(19) United States
(12) Patent Application Publication
(10) Pub. No.: US 2017/0037149 A1
(43) Pub. Date: Feb. 9, 2017

(54) ANTIBODY CONSTRUCTS FOR FLT3 AND CD3

(71) Applicant: AMGEN RESEARCH (MUNICH) GMBH, Munich (DE)

(72) Inventors: Tobias Raum, Munich (DE); Claudia Blümel, Munich (DE); Franziska Bott, Munich (DE); Christoph Dahlhoff, Munich (DE); Patrick Hoffmann, Munich (DE); Elisabeth Nahrwold, Munich (DE); Jochen Pendzialek, Munich (DE)

(21) Appl. No.: 15/225,568

(22) Filed: Aug. 1, 2016

Related U.S. Application Data
(60) Provisional application No. 62/290,861, filed on Feb. 3, 2016.
(60) Provisional application No. 62/199,944, filed on Jul. 31, 2015.

(51) Int. Cl. C07K 16/40; C07K 16/28

(52) U.S. Cl. CPC C07K 16/40; C07K 16/2809; C07K 2317/31; C07K 2317/56

(57) ABSTRACT

The present invention relates to a bispecific antibody construct comprising a first binding domain which binds to human FLT3 on the surface of a target cell and a second binding domain which binds to human CD3 on the surface of a T cell. Moreover, the invention provides a polynucleotide encoding the antibody construct, a vector comprising said polynucleotide and a host cell transformed or transfected with said polynucleotide or vector. Furthermore, the invention provides a process for the production of the antibody construct of the invention, a medical use of said antibody construct and a kit comprising said antibody construct.

[0001] The present invention relates to a bispecific antibody construct comprising a first binding domain which binds to human FLT3 on the surface of a target cell and a second binding domain which binds to human CD3 on the surface of a T cell. Moreover, the invention provides a polynucleotide encoding the antibody construct, a vector comprising said polynucleotide and a host cell transformed or transfected with said polynucleotide or vector. Furthermore, the invention provides a process for the production of the antibody construct of the invention, a medical use of said antibody construct and a kit comprising said antibody construct.

### INTRODUCTION

[0002] Acute Myeloid Leukemia (AML) is a heterogenous hematological malignancy that is the most common type of acute leukemia diagnosed in adults. AML accounts for roughly a third of all leukemias with an estimated 14,500 new cases reported in 2013 in the United States alone and poor overall survival rates. There has been little improvement in the standard of care for AML patients over the past thirty years. However, recent advances in molecular and cell biology have revolutionized our understanding of human hematopoiesis, both in normal and diseased states. Several key players involved in disease pathogenesis have been identified and can be interrogated as actionable targets. One such activating “driver” gene that is most commonly mutated in approximately 30% of AML is FLT3.

[0003] Fms-like tyrosine kinase 3 (FLT3) also known as fetal liver kinase 2 (FLK-2), human stem cell kinase 1 (SCK-1) or Cluster of Differentiation antigen (CD135) is a hematopoietic receptor tyrosine kinase that was cloned by two independent groups in the 1990s. The FLT3 gene, located on chromosome 13q12 in humans encodes a Class III receptor tyrosine kinase protein that shares homology with other Class III family members including stem cell factor receptor (c-KIT), macrophage colony-stimulating factor receptor (FMS) and platelet-derived growth factor receptor (PDGFR).

[0004] Upon binding with the FLT3 ligand, FLT3 receptor undergoes homodimerization thereby enabling autophosphorylation of specific tyrosine residues in the juxtamembrane domain and downstream activation via PI3K/Akt, MAPK and STAT5 pathways. FLT3 thus plays a crucial role in controlling proliferation, survival and differentiation of normal hematopoietic cells.

[0005] Human FLT3 is expressed in CD34+CD38− hematopoietic stem cells (HSC) as well as in a subset of dendritic precursor cells. FLT3 expression can also be detected in multipotent progenitor cells like the CD34+CD38+CD45RA−CD123^{low} Common Myeloid Progenitor (CMP), the CD34+CD38+CD45RA+CD123^{low} Granulocyte Monocyte Progenitors (GMP), and CD34+CD38+CD10+CD19− Common Lymphoid Progenitor cells (CLP). Interestingly, FLT3 expression is almost absent in the CD34+CD38-CD45RA−CD123− Megakaryocyte Erythrocyte Progenitor cells (MEP). FLT3 expression is thus confined mainly to the early myeloid and lymphoid progenitor cells with some expression in the more mature monocytic lineage cells. This limited expression pattern of FLT3 is in striking contrast to that of FLT3 ligand, which is expressed in most hematopoietic tissues and the prostate, kidney, lung, colon and heart. These varied expression patterns such that FLT3 expression is the rate limiting step in determining tissue specificity of FLT3 signaling pathways.

[0006] The most common FLT3 mutation in AML is the FLT3 internal tandem duplication (FLT3-ITD) that is found in 20 to 38% of patients with cytogenetically normal AML. FLT3-ITDs are formed when a portion of the juxtamembrane domain coding sequence gets duplicated and inserted in a head to tall orientation. FLT3 mutations have not been identified in patients with chronic lymphoid leukemia (CLL), non-Hodgkin's lymphoma and multiple myeloma suggesting strong disease specificity for AML. Mutant FLT3 activation is generally observed across all FAB subtypes, however, it is significantly increased in AML patients with FAB M5 (monocytic leukemia), while FAB subtypes M2 and M6 (granulocytic or erythroid leukemia) are significantly less frequently associated with FLT3 activation, in line with normal expression patterns of FLT3.

[0007] A small percentage of AML patients (5-7%) present with single amino acid mutations in the FLT3 tyrosine kinase domain (FLT3 TKD), most commonly at D835 or in some cases at T842 or 1836 while even fewer patients (˜1%) harbor mutations in the FLT3 juxtamembrane domain involving residues 579, 590, 591 and 594. Patients with FLT3-ITD mutant AML have an aggressive form of disease characterized by early relapse and poor survival, while overall survival and event-free survival are not significantly influenced by presence of FLT3-TKD mutations. Furthermore, AML patients with FLT3-ITD mutation with concurrent TET2 or DNMT3A mutations have an unfavorable overall risk profile compared to FLT3-ITD mutant AML patients with wild-type TET2 or DNMT3A underscoring the clinical and biological heterogeneity of AML.

[0008] Both FLT3-ITD and FLT3 TKD mutations induce ligand independent activation of FLT3 leading to downstream activation of the Ras/MAPK pathway and the PI3K/Akt pathways. However, the downstream signaling pathways associated with either mutation differ primarily in the preferential activation of STAT5 by FLT3-ITD, thereby leading to increased proliferation potential and aberrant regulation of DNA repair pathways.

[0009] Independent of FLT3 mutation status, FLT3 phosphorylation is evident in over two-thirds of AML patients and FLT3 is expressed in >80% AML blasts and in ˜90% of all AML patients making it an attractive therapeutic target associated with disease pathogenesis in a large sample size.

[0010] Several small molecule inhibitors have emerged as attractive therapeutic options for AML patients with FLT3 mutations. The first generation of FLT3 tyrosine kinase inhibitors (TKI) was characterized by lack of selectivity, potency and unfavorable pharmacokinetic properties. Newer and more selective agents have been developed to combat this issue; however, their efficacy has been limited by emergence of secondary resistance.

[0011] Several early FLT3 TKIs included midostaurin (PKC412), lestaurtinib (CEP-701), sunitinib (SUI1248) and sorafinib (BAY 43-9006) amongst others. Response rates in Phase I and Phase II with these multikinase targeting agents in patients with relapsed or refractory AML is limited, presumably due to their inability to achieve effective FLT3 inhibition without dose limiting toxicities. Quizartinib (AC220) has been developed as a second generation FLT3 TKI with high selectivity for FLT3 wild type and FLT3-ITD and has demonstrated benefit especially in the peri-transplant setting in a younger cohort of patients. However, secondary mutations in FLT3 identified in relapsed patients who received quizartinib accentuate the need to develop better therapeutic strategies for AML patients, while highlighting the validity of FLT3 as a therapeutic target.

[0012] Several targeted agents have been tested in AML patients with either de novo, relapsed/refractory or secondary disease. Epigenetic silencing of tumor suppressor genes plays an important role in AML disease pathogenesis, and DNA methyltransferase (DNMT) inhibitors like azacitadine and decitabine have achieved some clinical success. Further, the recent identification of mutations that affect histone posttranslational modifications (e.g. EZH2 and ASXL1 mutations) or DNA methylation (e.g. DNMT3A, TET2, IDH1/2) in a subset of AML patients has led to development of a variety of therapeutic options including EZH2, DOT1L, IDH1/2 inhibitors along with HDAC and proteasome inhibitors. However, preclinical studies of many of these compounds in AML cells suggest that these inhibitors may be altering the phenotype and gene expression characteristic of hematopoietic differentiation rather than causing direct cytotoxicity of AML blasts. There therefore remains a strong unmet medical need to identify novel targets/modalities to combat AML and cause targeted lysis of AML blast cells. Other therapeutic candidates for AML include Aurora kinase inhibitors including AMG 900 and inhibitors to polo-like kinases that play an important role in cell cycle progression.

[0013] The standard of care for AML patients has remained chemotherapy with stem cell transplantation when feasible. However the emergence of relapsed/refractory cases in a large majority of treated patients warrants additional therapeutic modalities. The identification and description of several leukemia specific antigens along with a clearer understanding of immune mediated graft-versus-leukemia effects have paved the way to development of immunomodulatory strategies for combating hematological malignancies, reviewed in several articles.

[0014] Gemtuzumab ozogamicin (GO) is an antibody-drug conjugate directed against CD33, a ubiquitous myeloid cell surface marker. GO was withdrawn from the market after randomized trials that showed no improvements in outcomes with GO therapy. However, there is a need for reappraisal of GO in AML and several trials have been initiated to evaluate the efficacy and toxicity of GO in a thorough manner. Other biological agents against AML include lintuzumab (SGN-33), a humanized anti-CD33 monoclonal antibody either in an unconjugated form or conjugated with radioactive bismuth and SL-401, comprised of human IL-3 coupled with a diphtheria toxin payload against the IL-3 receptor that is overexpressed in a majority of AML blasts. Next-generation monoclonal antibodies that target both tumor associated antigen and effector cytolytic T-cells include AMG 330 (a bi-specific T-cell engager or BiTE molecule that targets CD33) and MGD006, a dual affinity retargeting molecule which binds to CD123 and CD3.

[0015] The recent success of chimeric antigen receptor T-cells in refractory CLL and acute lymphoblastic leukemia (ALL) has paved the way forward to development of myeloid specific CAR-T cells including CD123 CAR-T and CD33 CAR-T therapies. Several efforts have also been invested in generating dendritic cell vaccines as well as combination with checkpoint blockade inhibitors in order to improve outcomes.

[0016] Therapeutic antibodies against FLT3 have also been generated. Antibody therapy is presumed to be more efficacious with low probability of development of secondary resistance mechanisms since the antibody is directed against the extracellular domain of FLT3, which is less prone to mutations than the intracellular kinase domain. The Imclone antibody, IMC-EB10 was evaluated in relapsed AML patients in a Phase I study, however, the study was terminated due to lack of efficacy (ClinicalTrials.gov Identifier: NCT00887926). There thus remains a pressing need to evaluate second generation monoclonal antibodies including bispecific antibodies for treatment of AML.

[0017] As there is still a need for having available further options for the treatment of hematological diseases diseases related to the expression of FLT3, there are provided herewith means and methods for the solution of this problem in the form of a bispecific antibody construct having a binding domain directed to FLT3 on the surface of tumor target cells and a second binding domain directed to CD3 on the surface of T cells.

[0018] Thus, in a first aspect, the present invention provides a bispecific antibody construct comprising a first binding domain which binds to human FLT3 on the surface of a target cell and a second binding domain which binds to human CD3 on the surface of a T cell, wherein the first binding domain binds to an epitope of FLT3 which is comprised within the extracellular region of FLT3 as depicted in SEQ ID NOs: 801-804.

[0019] It must be noted that as used herein, the singular forms “a”, “an”, and “the” include plural references unless the context clearly indicates otherwise. Thus, for example, reference to “a reagent” includes one or more of such different reagents and reference to “the method” includes reference to equivalent steps and methods known to those of ordinary skill in the art that could be modified or substituted for the methods described herein.

[0020] Unless otherwise indicated, the term “at least” preceding a series of elements is to be understood to refer to every element in the series. Those skilled in the art will recognize, or be able to ascertain using no more than routine experimentation, many equivalents to the specific embodiments of the invention described herein. Such equivalents are intended to be encompassed by the present invention.

[0021] The term “and/or” wherever used herein includes the meaning of “and”, “or” and “all or any other combination of the elements connected by said term”.

[0022] The term “about” or “approximately” as used herein means within ±20%, preferably within ±15%, more preferably within ±10%, and most preferably within ±5% of a given value or range.

[0023] Throughout this specification and the claims which follow, unless the context requires otherwise, the word “comprise”, and variations such as “comprises” and “comprising”, will be understood to imply the inclusion of a stated integer or step or group of integers or steps but not the exclusion of any other integer or step or group of integer or step. When used herein the term “comprising” can be substituted with the term “containing” or “including” or sometimes when used herein with the term “having”.

[0024] When used herein “consisting of” excludes any element, step, or ingredient not specified in the claim element. When used herein, “consisting essentially of” does not exclude materials or steps that do not materially affect the basic and novel characteristics of the claim.

[0025] In each instance herein any of the terms “comprising”, “consisting essentially of” and “consisting of” may be replaced with either of the other two terms.

[0026] The term “antibody construct” refers to a molecule in which the structure and/or function is/are based on the structure and/or function of an antibody, e.g., of a full-length or whole immunoglobulin molecule. An antibody construct is hence capable of binding to its specific target or antigen. Furthermore, an antibody construct according to the invention comprises the minimum structural requirements of an antibody which allow for the target binding. This minimum requirement may e.g. be defined by the presence of at least the three light chain CDRs (i.e. CDR1, CDR2 and CDR3 of the VL region) and/or the three heavy chain CDRs (i.e. CDR1, CDR2 and CDR3 of the VH region), preferably of all six CDRs. The antibodies on which the constructs according to the invention are based include for example monoclonal, recombinant, chimeric, deimmunized, humanized and human antibodies.

[0027] Within the definition of “antibody constructs” according to the invention are full-length or whole antibodies also including camelid antibodies and other immunoglobulin antibodies generated by biotechnological or protein engineering methods or processes. These full-length antibodies may be for example monoclonal, recombinant, chimeric, deimmunized, humanized and human antibodies. Also within the definition of “antibody constructs” are fragments of full-length antibodies, such as VH, VHH, VL, (s)dAb, Fv, Fd, Fab, Fab′, F(ab′)2 or “r IgG” (“half antibody”). Antibody constructs according to the invention may also be modified fragments of antibodies, also called antibody variants, such as scFv, di-scFv or bi(s)-scFv, scFv-Fc, scFv-zipper, scFab, Fab2, Fab3, diabodies, single chain diabodies, tandem diabodies (Tandab's), tandem di-scFv, tandem tri-scFv, “minibodies” exemplified by a structure which is as follows: (VH-VL-CH3)₂, (scFv-CH3)₂, ((scFv)₂-CH3+CH3), ((scFv)₂-CH3) or (scFv-CH3-scFv)₂, multibodies such as triabodies or tetrabodies, and single domain antibodies such as nanobodies or single variable domain antibodies comprising merely one variable domain, which might be VHH, VH or VL, that specifically bind an antigen or epitope independently of other V regions or domains.

[0028] A binding domain may typically comprise an antibody light chain variable region (VL) and an antibody heavy chain variable region (VH); however, it does not have to comprise both. Fd fragments, for example, have two VH regions and often retain some antigen-binding function of the intact antigen-binding domain. Additional examples for the format of antibody fragments, antibody variants or binding domains include (1) a Fab fragment, a monovalent fragment having the VL, VH, CL and CH1 domains; (2) a F(ab′)2 fragment, a bivalent fragment having two Fab fragments linked by a disulfide bridge at the hinge region; (3) an Fd fragment having the two VH and CH1 domains; (4) an Fv fragment having the VL and VH domains of a single arm of an antibody, (5) a dAb fragment (Ward et al., (1989) Nature 341:544-546), which has a VH domain; (6) an isolated complementarity determining region (CDR), and (7) a single chain Fv (scFv), the latter being preferred (for example, derived from an scFV-library). Examples for embodiments of antibody constructs according to the invention are e.g. described in WO 00/006605, WO 2005/040220, WO 2008/119567, WO 2010/037838, WO 2013/026837, WO 2013/026833, US 2014/0308285, US 2014/0302037, W O2014/144722, WO 2014/151910, and WO 2015/048272.

[0029] Furthermore, the definition of the term “antibody construct” includes monovalent, bivalent and polyvalent/multivalent constructs and, thus, monospecific constructs, specifically binding to only one antigenic structure, as well as bispecific and polyspecific/multispecific constructs, which specifically bind more than one antigenic structure, e.g. two, three or more, through distinct binding domains. Moreover, the definition of the term “antibody construct” includes molecules consisting of only one polypeptide chain as well as molecules consisting of more than one polypeptide chain, which chains can be either identical (homodimers, homotrimers or homo oligomers) or different (heterodimer, heterotrimer or heterooligomer). Examples for the above identified antibodies and variants or derivatives thereof are described inter alia in Harlow and Lane, Antibodies a laboratory manual, CSHL Press (1988) and Using Antibodies: a laboratory manual, CSHL Press (1999), Kontermann and Dübel, Antibody Engineering, Springer, 2nd ed. 2010 and Little, Recombinant Antibodies for Immunotherapy, Cambridge University Press 2009.

[0030] The antibody constructs of the present invention are preferably “in vitro generated antibody constructs”. This term refers to an antibody construct according to the above definition where all or part of the variable region (e.g., at least one CDR) is generated in a non-immune cell selection, e.g., an in vitro phage display, protein chip or any other method in which candidate sequences can be tested for their ability to bind to an antigen. This term thus preferably excludes sequences generated solely by genomic rearrangement in an immune cell in an animal. A “recombinant antibody” is an antibody made through the use of recombinant DNA technology or genetic engineering.

[0031] The term “monoclonal antibody” (mAb) or monoclonal antibody construct as used herein refers to an antibody obtained from a population of substantially homogeneous antibodies, i.e., the individual antibodies comprising the population are identical except for possible naturally occurring mutations and/or post-translation modifications (e.g., isomerizations, amidations) that may be present in minor amounts. Monoclonal antibodies are highly specific, being directed against a single antigenic site or determinant on the antigen, in contrast to conventional (polyclonal) antibody preparations which typically include different antibodies directed against different determinants (or epitopes). In addition to their specificity, the monoclonal antibodies are advantageous in that they are synthesized by the hybridoma culture, hence uncontaminated by other immunoglobulins. The modifier “monoclonal” indicates the character of the antibody as being obtained from a substantially homogeneous population of antibodies, and is not to be construed as requiring production of the antibody by any particular method.

[0032] For the preparation of monoclonal antibodies, any technique providing antibodies produced by continuous cell line cultures can be used. For example, monoclonal antibodies to be used may be made by the hybridoma method first described by Koehler et al., Nature, 256: 495 (1975), or may be made by recombinant DNA methods (see, e.g., U.S. Pat. No. 4,816,567). Examples for further techniques to produce human monoclonal antibodies include the trioma technique, the human B-cell hybridoma technique (Kozbor, Immunology Today 4 (1983), 72) and the EBV-hybridoma technique (Cole et al., Monoclonal Antibodies and Cancer Therapy, Alan R. Liss, Inc. (1985), 77-96).

[0033] Hybridomas can then be screened using standard methods, such as enzyme-linked immunosorbent assay (ELISA) and surface plasmon resonance (BIACORE™) analysis, to identify one or more hybridomas that produce an antibody that specifically binds with a specified antigen. Any form of the relevant antigen may be used as the immunogen, e.g., recombinant antigen, naturally occurring forms, any variants or fragments thereof, as well as an antigenic peptide thereof. Surface plasmon resonance as employed in the BIAcore system can be used to increase the efficiency of phage antibodies which bind to an epitope of a target antigen, such as FLT3 or CD3 epsilon (Schier, Human Antibodies Hybridomas 7 (1996), 97-105; Malmborg, J. Immunol. Methods 183 (1995), 7-13).

[0034] Another exemplary method of making monoclonal antibodies includes screening protein expression libraries, e.g., phage display or ribosome display libraries. Phage display is described, for example, in Ladner et al., U.S. Pat. No. 5,223,409; Smith (1985) Science 228:1315-1317, Clackson et al., Nature, 352: 624-628 (1991) and Marks et al., J. Mol. Biol., 222: 581-597 (1991).

[0035] In addition to the use of display libraries, the relevant antigen can be used to immunize a non-human animal, e.g., a rodent (such as a mouse, hamster, rabbit or rat). In one embodiment, the non-human animal includes at least a part of a human immunoglobulin gene. For example, it is possible to engineer mouse strains deficient in mouse antibody production with large fragments of the human Ig (immunoglobulin) loci. Using the hybridoma technology, antigen-specific monoclonal antibodies derived from the genes with the desired specificity may be produced and selected. See, e.g., XENOMOUSE™, Green et al. (1994) Nature Genetics 7:13-21, US 2003-0070185, WO 96/34096, and WO 96/33735.

[0036] A monoclonal antibody can also be obtained from a non-human animal, and then modified, e.g., humanized, deimmunized, rendered chimeric etc., using recombinant DNA techniques known in the art. Examples of modified antibody constructs include humanized variants of non-human antibodies, “affinity matured” antibodies (see, e.g. Hawkins et al. J. Mol. Biol. 254, 889-896 (1992) and Lowman et al., Biochemistry 30, 10832-10837 (1991)) and antibody mutants with altered effector function(s) (see, e.g., U.S. Pat. No. 5,648,260, Kontermann and Dübel (2010), loc. cit. and Little (2009), loc. cit.).

[0037] In immunology, affinity maturation is the process by which B cells produce antibodies with increased affinity for antigen during the course of an immune response. With repeated exposures to the same antigen, a host will produce antibodies of successively greater affinities. Like the natural prototype, the in vitro affinity maturation is based on the principles of mutation and selection. The in vitro affinity maturation has successfully been used to optimize antibodies, antibody constructs, and antibody fragments. Random mutations inside the CDRs are introduced using radiation, chemical mutagens or error-prone PCR. In addition, the genetical diversity can be increased by chain shuffling. Two or three rounds of mutation and selection using display methods like phage display usually results in antibody fragments with affinities in the low nanomolar range.

[0038] A preferred type of an amino acid substitutional varianation of the antibody constructs involves substituting one or more hypervariable region residues of a parent antibody (e. g. a humanized or human antibody). Generally, the resulting variant(s) selected for further development will have improved biological properties relative to the parent antibody from which they are generated. A convenient way for generating such substitutional variants involves affinity maturation using phage display. Briefly, several hypervariable region sites (e. g. 6-7 sites) are mutated to generate all possible amino acid substitutions at each site. The antibody variants thus generated are displayed in a monovalent fashion from filamentous phage particles as fusions to the gene III product of M13 packaged within each particle. The phage-displayed variants are then screened for their biological activity (e. g. binding affinity) as herein disclosed. In order to identify candidate hypervariable region sites for modification, alanine scanning mutagenesis can be performed to identify hypervariable region residues contributing significantly to antigen binding. Alternatively, or additionally, it may be beneficial to analyze a crystal structure of the antigen-antibody complex to identify contact points between the binding domain and, e.g., human FLT3. Such contact residues and neighbouring residues are candidates for substitution according to the techniques elaborated herein. Once such variants are generated, the panel of variants is subjected to screening as described herein and antibodies with superior properties in one or more relevant assays may be selected for further development.

[0039] The monoclonal antibodies and antibody constructs of the present invention specifically include “chimeric” antibodies (immunoglobulins) in which a portion of the heavy and/or light chain is identical with or homologous to corresponding sequences in antibodies derived from a particular species or belonging to a particular antibody class or subclass, while the remainder of the chain(s) is/are identical with or homologous to corresponding sequences in antibodies derived from another species or belonging to another antibody class or subclass, as well as fragments of such antibodies, so long as they exhibit the desired biological activity (U.S. Pat. No. 4,816,567; Morrison et al., Proc. Natl. Acad. Sci. USA, 81: 6851-6855 (1984)). Chimeric antibodies of interest herein include “primitized” antibodies comprising variable domain antigen-binding sequences derived from a non-human primate (e.g., Old World Monkey, Ape etc.) and human constant region sequences. A variety of approaches for making chimeric antibodies have been described. See e.g., Morrison et al., Proc. Natl. Acad. ScL U.S.A. 81:6851, 1985; Takeda et al., Nature 314:452, 1985, Cabilly et al., U.S. Pat. No. 4,816,567; Boss et al., U.S. Pat. No. 4,816,397; Tanaguchi et al., EP 0171496; EP 0173494; and GB 2177096.

[0040] An antibody, antibody construct, antibody fragment or antibody variant may also be modified by specific deletion of human T cell epitopes (a method called “deimmunization”) by the methods disclosed for example in WO 98/52976 or WO 00/34317. Briefly, the heavy and light chain variable domains of an antibody can be analyzed for peptides that bind to MHC class II; these peptides represent potential T cell epitopes (as defined in WO 98/52976 and WO 00/34317). For detection of potential T cell epitopes, a computer modeling approach termed “peptide threading” can be applied, and in addition a database of human MHC class II binding peptides can be searched for motifs present in the VH and VL sequences, as described in WO 98/52976 and WO 00/34317. These motifs bind to any of the 18 major MHC class II DR allotypes, and thus constitute potential T cell epitopes. Potential T cell epitopes detected can be eliminated by substituting small numbers of amino acid residues in the variable domains, or preferably, by single amino acid substitutions. Typically, conservative substitutions are made. Often, but not exclusively, an amino acid common to a position in human germline antibody sequences may be used. Human germline sequences are disclosed e.g. in Tomlinson, et al. (1992) J. Mol. Biol. 227:776-798; Cook, G. P. et al. (1995) Immunol. Today Vol. 16(5): 237-242; and Tomlinson et al. (1995) EMBO J. 14: 14:4628-4638. The V BASE directory provides a comprehensive directory of human immunoglobulin variable region sequences (compiled by Tomlinson, L A. et al. MRC Centre for Protein Engineering, Cambridge, UK). These sequences can be used as a source of human sequence, e.g., for framework regions and CDRs. Consensus human framework regions can also be used, for example as described in U.S. Pat. No. 6,300,064.

[0041] “Humanized” antibodies, antibody constructs, variants or fragments thereof (such as Fv, Fab, Fab′, F(ab′)2 or other antigen-binding subsequences of antibodies) are antibodies or immunoglobulins of mostly human sequences, which contain (a) minimal sequence(s) derived from non-human immunoglobulin. For the most part, humanized antibodies are human immunoglobulins (recipient antibody) in which residues from a hypervariable region (also CDR) of the recipient are replaced by residues from a hypervariable region of a non-human (e.g., rodent) species (donor antibody) such as mouse, rat, hamster or rabbit having the desired specificity, affinity, and capacity. In some instances, Fv framework region (FR) residues of the human immunoglobulin are replaced by corresponding non-human residues. Furthermore, “humanized antibodies” as used herein may also comprise residues which are found neither in the recipient antibody nor the donor antibody. These modifications are made to further refine and optimize antibody performance. The humanized antibody may also comprise at least a portion of an immunoglobulin constant region (Fc), typically that of a human immunoglobulin. For further details, see Jones et al., Nature, 321: 522-525 (1986); Reichmann et al., Nature, 332: 323-329 (1988); and Presta, Curr. Op. Struct. Biol., 2: 593-596 (1992).

[0042] Humanized antibodies or fragments thereof can be generated by replacing sequences of the Fv variable domain that are not directly involved in antigen binding with equivalent sequences from human Fv variable domains. Exemplary methods for generating humanized antibodies or fragments thereof are provided by Morrison (1985) Science 229:1202-1207; by Oi et al. (1986) BioTechniques 4:214; and by U.S. Pat. No. 5,585,089; U.S. Pat. No. 5,693,761; U.S. Pat. No. 5,693,762; U.S. Pat. No. 5,859,205; and U.S. Pat. No. 6,407,213. Those methods include isolating, manipulating, and expressing the nucleic acid sequences that encode all or part of immunoglobulin Fv variable domains from at least one of a heavy or light chain. Such nucleic acids may be obtained from a hybridoma producing an antibody against a predetermined target, as described above, as well as from other sources. The recombinant DNA encoding the humanized antibody molecule can then be cloned into an appropriate expression vector.

[0043] Humanized antibodies may also be produced using transgenic animals such as mice that express human heavy and light chain genes, but are incapable of expressing the endogenous mouse immunoglobulin heavy and light chain genes. Winter describes an exemplary CDR grafting method that may be used to prepare the humanized antibodies described herein (U.S. Pat. No. 5,225,539). All of the CDRs of a particular human antibody may be replaced with at least a portion of a non-human CDR, or only some of the CDRs may be replaced with non-human CDRs. It is only necessary to replace the number of CDRs required for binding of the humanized antibody to a predetermined antigen.

[0044] A humanized antibody can be optimized by the introduction of conservative substitutions, consensus sequence substitutions, germline substitutions and/or back mutations. Such altered immunoglobulin molecules can be made by any of several techniques known in the art, (e.g., Teng et al., Proc. Natl. Acad. Sci. U.S.A., 80: 7308-7312, 1983; Kozbor et al., Immunology Today, 4: 7279, 1983; Olsson et al., Meth. Enzymol., 92: 3-16, 1982, and EP 239 400).

[0045] The term “human antibody”, “human antibody construct” and “human binding domain” includes antibodies, antibody constructs and binding domains having antibody regions such as variable and constant regions or domains which correspond substantially to human germline immunoglobulin sequences known in the art, including, for example, those described by Kabat et al. (1991) (loc. cit.). The human antibodies, antibody constructs or binding domains of the invention may include amino acid residues not encoded by human germline immunoglobulin sequences (e.g., mutations introduced by random or site-specific mutagenesis in vitro or by somatic mutation in vivo), for example in the CDRs, and in particular, in CDR3. The human antibodies, antibody constructs or binding domains can have at least one, two, three, four, five, or more positions replaced with an amino acid residue that is not encoded by the human germline immunoglobulin sequence. The definition of human antibodies, antibody constructs and binding domains as used herein also contemplates fully human antibodies, which include only non-artificially and/or genetically altered human sequences of antibodies as those can be derived by using technologies or systems such as the Xenomouse.

[0046] In some embodiments, the antibody constructs of the invention are “isolated” or “substantially pure” antibody constructs. “Isolated” or “substantially pure”, when used to describe the antibody constructs disclosed herein, means an antibody construct that has been identified, separated and/or recovered from a component of its production environment. Preferably, the antibody construct is free or substantially free of association with all other components from its production environment. Contaminant components of its production environment, such as that resulting from recombinant transfected cells, are materials that would typically interfere with diagnostic or therapeutic uses for the polypeptide, and may include enzymes, hormones, and other proteinaceous or non-proteinaceous solutes. The antibody constructs may e.g constitute at least about 5%, or at least about 50% by weight of the total protein in a given sample. It is understood that the isolated protein may constitute from 5% to 99.9% by weight of the total protein content, depending on the circumstances. The polypeptide may be made at a significantly higher concentration through the use of an inducible promoter or high expression promoter, such that it is made at increased concentration levels. The definition includes the production of an antibody construct in a wide variety of organisms and/or host cells that are known in the art. In preferred embodiments, the antibody construct will be purified (1) to a degree sufficient to obtain at least 15 residues of N-terminal or internal amino acid sequence by use of a spinning cup sequenator, or (2) to homogeneity by SDS-PAGE under non-reducing or reducing conditions using Coomassie blue or, preferably, silver stain. Ordinarily, however, an isolated antibody construct will be prepared by at least one purification step.

[0047] The term “binding domain” characterizes in connection with the present invention a domain which (specifically) binds to/interacts with/recognizes a given target epitope or a given target site on the target molecules (antigens), here: FLT3 and CD3, respectively. The structure and function of the first binding domain (recognizing FLT3), and preferably also the structure and/or function of the second binding domain (recognizing CD3), is/are based on the structure and/or function of an antibody, e.g. of a full-length or whole immunoglobulin molecule. According to the invention, the first binding domain is characterized by the presence of three light chain CDRs (i.e. CDR1, CDR2 and CDR3 of the VL region) and/or three heavy chain CDRs (i.e. CDR1, CDR2 and CDR3 of the VH region). The second binding domain preferably also comprises the minimum structural requirements of an antibody which allow for the target binding. More preferably, the second binding domain comprises at least three light chain CDRs (i.e. CDR1, CDR2 and CDR3 of the VL region) and/or three heavy chain CDRs (i.e. CDR1, CDR2 and CDR3 of the VH region). It is envisaged that the first and/or second binding domain is produced by or obtainable by phage-display or library screening methods rather than by grafting CDR sequences from a pre-existing (monoclonal) antibody into a scaffold.

[0048] According to the present invention, binding domains are in the form of one or more polypeptides. Such polypeptides may include proteinaceous parts and non-proteinaceous parts (e.g. chemical linkers or chemical cross-linking agents such as glutaraldehyde). Proteins (including fragments thereof, preferably biologically active fragments, and peptides, usually having less than 30 amino acids) comprise two or more amino acids coupled to each other via a covalent peptide bond (resulting in a chain of amino acids). The term “polypeptide” as used herein describes a group of molecules, which usually consist of more than 30 amino acids. Polypeptides may further form multimers such as dimers, trimers and higher oligomers, i.e., consisting of more than one polypeptide molecule. Polypeptide molecules forming such dimers, trimers etc. may be identical or non-identical. The corresponding higher order structures of such multimers are, consequently, termed homo- or heterodimers, homo- or heterotrimers etc. An example for a hereteromultimer is an antibody molecule, which, in its naturally occurring form, consists of two identical light polypeptide chains and two identical heavy polypeptide chains. The terms “peptide”, “polypeptide” and “protein” also refer to naturally modified peptides/polypeptides/proteins wherein the modification is effected e.g. by post-translational modifications like glycosylation, acetylation, phosphorylation and the like. A “peptide”, “polypeptide” or “protein” when referred to herein may also be chemically modified such as pegylated. Such modifications are well known in the art and described herein below.

[0049] Preferably the binding domain which binds to FLT3 and/or the binding domain which binds to CD3 is/are human binding domains. Antibodies and antibody constructs comprising at least one human binding domain avoid some of the problems associated with antibodies or antibody constructs that possess non-human such as rodent (e.g. murine, rat, hamster or rabbit) variable and/or constant regions. The presence of such rodent derived proteins can lead to the rapid clearance of the antibodies or antibody constructs or can lead to the generation of an immune response against the antibody or antibody construct by a patient. In order to avoid the use of rodent derived antibodies or antibody constructs, human or fully human antibodies/antibody constructs can be generated through the introduction of human antibody function into a rodent so that the rodent produces fully human antibodies.

[0050] The ability to clone and reconstruct megabase-sized human loci in YACs and to introduce them into the mouse germline provides a powerful approach to elucidating the functional components of very large or crudely mapped loci as well as generating useful models of human disease. Furthermore, the use of such technology for substitution of mouse loci with their human equivalents could provide unique insights into the expression and regulation of human gene products during development, their communication with other systems, and their involvement in disease induction and progression.

[0051] An important practical application of such a strategy is the “humanization” of the mouse humoral immune system. Introduction of human immunoglobulin (Ig) loci into mice in which the endogenous Ig genes have been inactivated offers the opportunity to study the mechanisms underlying programmed expression and assembly of antibodies as well as their role in B-cell development. Furthermore, such a strategy could provide an ideal source for production of fully human monoclonal antibodies (mAbs)—an important milestone towards fulfilling the promise of antibody therapy in human disease. Fully human antibodies or antibody constructs are expected to minimize the immunogenic and allergic responses intrinsic to mouse or mouse-derivatized mAbs and thus to increase the efficacy and safety of the administered antibodies/antibody constructs. The use of fully human antibodies or antibody constructs can be expected to provide a substantial advantage in the treatment of chronic and recurring human diseases, such as inflammation, autoimmunity, and cancer, which require repeated compound administrations.

[0052] One approach towards this goal was to engineer mouse strains deficient in mouse antibody production with large fragments of the human Ig loci in anticipation that such mice would produce a large repertoire of human antibodies in the absence of mouse antibodies. Large human Ig fragments would preserve the large variable gene diversity as well as the proper regulation of antibody production and expression. By exploiting the mouse machinery for antibody diversification and selection and the lack of immunological tolerance to human proteins, the reproduced human antibody repertoire in these mouse strains should yield high affinity antibodies against any antigen of interest, including human antigens. Using the hybridoma technology, antigen-specific human mAbs with the desired specificity could be readily produced and selected. This general strategy was demonstrated in connection with the generation of the first XenoMouse mouse strains (see Green et al. Nature Genetics 7:13-21 (1994)). The XenoMouse strains were engineered with yeast artificial chromosomes (YACs) containing 245 kb and 190 kb-sized germline configuration fragments of the human heavy chain locus and kappa light chain locus, respectively, which contained core variable and constant region sequences. The human Ig containing YACs proved to be compatible with the mouse system for both rearrangement and expression of antibodies and were capable of substituting for the inactivated mouse Ig genes. This was demonstrated by their ability to induce B cell development, to produce an adult-like human repertoire of fully human antibodies, and to generate antigen-specific human mAbs. These results also suggested that introduction of larger portions of the human Ig loci containing greater numbers of V genes, additional regulatory elements, and human Ig constant regions might recapitulate substantially the full repertoire that is characteristic of the human humoral response to infection and immunization. The work of Green et al. was recently extended to the introduction of greater than approximately 80% of the human antibody repertoire through introduction of megabase sized, germline configuration YAC fragments of the human heavy chain loci and kappa light chain loci, respectively. See Mendez et al. Nature Genetics 15:146-156 (1997) and U.S. patent application Ser. No. 08/759,620.

[0053] The production of the XenoMouse mice is further discussed and delineated in U.S. patent application Ser. No. 07/466,008, Ser. No. 07/610,515, Ser. No. 07/919,297, Ser. No. 07/922,649, Ser. No. 08/031,801, Ser. No. 08/112,848, Ser. No. 08/234,145, Ser. No. 08/376,279, Ser. No. 08/430,938, Ser. No. 08/464,584, Ser. No. 08/464,582, Ser. No. 08/463,191, Ser. No. 08/462,837, Ser. No. 08/486,853, Ser. No. 08/486,857, Ser. No. 08/486,859, Ser. No. 08/462,513, Ser. No. 08/724,752, and Ser. No. 08/759,620; and U.S. Pat. Nos. 6,162,963; 6,150,584; 6,114,598; 6,075,181, and 5,939,598 and Japanese Patent Nos. 3 068 180 B2, 3 068 506 B2, and 3 068 507 B2. See also Mendez et al. Nature Genetics 15:146-156 (1997) and Green and Jakobovits J. Exp. Med. 188:483-495 (1998), EP 0 463 151 B1, WO 94/02602, WO 96/34096, WO 98/24893, WO 00/76310, and WO 03/47336.

[0054] In an alternative approach, others, including GenPharm International, Inc., have utilized a “minilocus” approach. In the minilocus approach, an exogenous Ig locus is mimicked through the inclusion of pieces (individual genes) from the Ig locus. Thus, one or more VH genes, one or more DH genes, one or more JH genes, a mu constant region, and a second constant region (preferably a gamma constant region) are formed into a construct for insertion into an animal. This approach is described in U.S. Pat. No. 5,545,807 to Surani et al. and U.S. Pat. Nos. 5,545,806; 5,625,825; 5,625,126; 5,633,425; 5,661,016; 5,770,429; 5,789,650; 5,814,318; 5,877,397; 5,874,299; and 6,255,458 each to Lonberg and Kay, U.S. Pat. Nos. 5,591,669 and 6,023,010 to Krimpenfort and Berns, U.S. Pat. Nos. 5,612,205; 5,721,367; and U.S. Pat. No. 5,789,215 to Berns et al., and U.S. Pat. No. 5,643,763 to Choi and Dunn, and GenPharm International U.S. patent application Ser. No. 07/574,748, Ser. No. 07/575,962, Ser. No. 07/810,279, Ser. No. 07/853,408, Ser. No. 07/904,068, Ser. No. 07/990,860, Ser. No. 08/053,131, Ser. No. 08/096,762, Ser. No. 08/155,301, Ser. No. 08/161,739, Ser. No. 08/165,699, Ser. No. 08/209,741. See also EP 0 546 073 B1, WO 92/03918, WO 92/22645, WO 92/22647, WO 92/22670, WO 93/12227, WO 94/00569, WO 94/25585, WO 96/14436, WO 97/13852, and WO 98/24884 and U.S. Pat. No. 5,981,175. See further Taylor et al. (1992), Chen et al. (1993), Tuaillon et al. (1993), Choi et al. (1993), Lonberg et al. (1994), Taylor et al. (1994), and Tuaillon et al. (1995), Fishwild et al. (1996).

[0055] Kirin has also demonstrated the generation of human antibodies from mice in which, through microcell fusion, large pieces of chromosomes, or entire chromosomes, have been introduced. See European Patent Application Nos. 773 288 and 843 961. Xenerex Biosciences is developing a technology for the potential generation of human antibodies. In this technology, SCID mice are reconstituted with human lymphatic cells, e.g., B and/or T cells. Mice are then immunized with an antigen and can generate an immune response against the antigen. See U.S. Pat. Nos. 5,476,996; 5,698,767; and 5,958,765.

[0056] Human anti-mouse antibody (HAMA) responses have led the industry to prepare chimeric or otherwise humanized antibodies. It is however expected that certain human anti-chimeric antibody (HACA) responses will be observed, particularly in chronic or multi-dose utilizations of the antibody. Thus, it would be desirable to provide antibody constructs comprising a human binding domain against FLT3 and a human binding domain against CD3 in order to vitiate concerns and/or effects of HAMA or HACA response.

[0057] The terms “(specifically) binds to”, (specifically) recognizes”, “is (specifically) directed to”, and “(specifically) reacts with” mean in accordance with this invention that a binding domain interacts or specifically interacts with a given epitope or a given target site on the target molecules (antigens), here: FLT3 and CD3, respectively.

[0058] The term “epitope” refers to a site on an antigen to which a binding domain, such as an antibody or immunoglobulin, or a derivative, fragment or variant of an antibody or an immunoglobulin, specifically binds. An “epitope” is antigenic and thus the term epitope is sometimes also referred to herein as “antigenic structure” or “antigenic determinant”. Thus, the binding domain is an “antigen interaction site”. Said binding/interaction is also understood to define a “specific recognition”.

[0059] “Epitopes” can be formed both by contiguous amino acids or non-contiguous amino acids juxtaposed by tertiary folding of a protein. A “linear epitope” is an epitope where an amino acid primary sequence comprises the recognized epitope. A linear epitope typically includes at least 3 or at least 4, and more usually, at least 5 or at least 6 or at least 7, for example, about 8 to about 10 amino acids in a unique sequence.

[0060] A “conformational epitope”, in contrast to a linear epitope, is an epitope wherein the primary sequence of the amino acids comprising the epitope is not the sole defining component of the epitope recognized (e.g., an epitope wherein the primary sequence of amino acids is not necessarily recognized by the binding domain). Typically a conformational epitope comprises an increased number of amino acids relative to a linear epitope. With regard to recognition of conformational epitopes, the binding domain recognizes a three-dimensional structure of the antigen, preferably a peptide or protein or fragment thereof (in the context of the present invention, the antigenic structure for one of the binding domains is comprised within the FLT3 protein). For example, when a protein molecule folds to form a three-dimensional structure, certain amino acids and/or the polypeptide backbone forming the conformational epitope become juxtaposed enabling the antibody to recognize the epitope. Methods of determining the conformation of epitopes include, but are not limited to, x-ray crystallography, two-dimensional nuclear magnetic resonance (2D-NMR) spectroscopy and site-directed spin labelling and electron paramagnetic resonance (EPR) spectroscopy.

[0061] A method for epitope mapping is described in the following: When a region (a contiguous amino acid stretch) in the human FLT3 protein is exchanged/replaced with its corresponding region of a non-human and non-primate FLT3 antigen (e.g., mouse FLT3, but others like chicken, rat, hamster, rabbit etc. might also be conceivable), a decrease in the binding of the binding domain is expected to occur, unless the binding domain is cross-reactive for the non-human, non-primate FLT3 used. Said decrease is preferably at least 10%, 20%, 30%, 40%, or 50%; more preferably at least 60%, 70%, or 80%, and most preferably 90%, 95% or even 100% in comparison to the binding to the respective region in the human FLT3 protein, whereby binding to the respective region in the human FLT3 protein is set to be 100%. It is envisaged that the aforementioned human FLT3/non-human FLT3 chimeras are expressed in CHO cells. It is also envisaged that the human FLT3/non-human FLT3 chimeras are fused with a transmembrane domain and/or cytoplasmic domain of a different membrane-bound protein such as EpCAM, see Example 1 and 2.

[0062] In an alternative or additional method for epitope mapping, several truncated versions of the human FLT3 extracellular domain can be generated in order to determine a specific region that is recognized by a binding domain. In these truncated versions, the different extracellular FLT3 domains/sub-domains or regions are stepwise deleted, starting from the N-terminus. The truncated FLT3 versions that were generated and used in the context of the present invention are depicted in is envisaged that the truncated FLT3 versions may be expressed in CHO cells. It is also envisaged that the truncated FLT3 versions may be fused with a transmembrane domain and/or cytoplasmic domain of a different membrane-bound protein such as EpCAM. It is also envisaged that the truncated FLT3 versions may encompass a signal peptide domain at their N-terminus, for example a signal peptide derived from mouse IgG heavy chain signal peptide. It is furthermore envisaged that the truncated FLT3 versions may encompass a v5 domain at their N-terminus (following the signal peptide) which allows verifying their correct expression on the cell surface. A decrease or a loss of binding is expected to occur with those truncated FLT3 versions which do not encompass any more the FLT3 region that is recognized by the binding domain. The decrease of binding is preferably at least 10%, 20%, 30%, 40%, 50%; more preferably at least 60%, 70%, 80%, and most preferably 90%, 95% or even 100%, whereby binding to the entire human FLT3 protein (or its extracellular region or domain) is set to be 100%, see Example 3.

[0063] A further method to determine the contribution of a specific residue of a target antigen to the recognition by a antibody construct or binding domain is alanine scanning (see e.g. Morrison K L & Weiss G A. Cur Opin Chem Biol. 2001 June; 5(3):302-7), where each residue to be analyzed is replaced by alanine, e.g. via site-directed mutagenesis. Alanine is used because of its non-bulky, chemically inert, methyl functional group that nevertheless mimics the secondary structure references that many of the other amino acids possess. Sometimes bulky amino acids such as valine or leucine can be used in cases where conservation of the size of mutated residues is desired. Alanine scanning is a mature technology which has been used for a long period of time.

[0064] The interaction between the binding domain and the epitope or the region comprising the epitope implies that a binding domain exhibits appreciable affinity for the epitope/the region comprising the epitope on a particular protein or antigen (here: FLT3 and CD3, respectively) and, generally, does not exhibit significant reactivity with proteins or antigens other than FLT3 or CD3. “Appreciable affinity” includes binding with an affinity of about 10⁻⁶ M (KD) or stronger. Preferably, binding is considered specific when the binding affinity is about 10⁻¹² to 10⁻⁸ M, 10⁻¹² to 10⁻⁹ M, 10⁻¹² to 10⁻¹⁰ M, 10⁻¹¹ to 10⁻⁸ M, preferably of about 10⁻¹¹ to 10⁻⁸ M. Whether a binding domain specifically reacts with or binds to a target can be tested readily by, inter alia, comparing the reaction of said binding domain with a target protein or antigen with the reaction of said binding domain with proteins or antigens other than FLT3 or CD3. Preferably, a binding domain of the invention does not essentially or substantially bind to proteins or antigens other than FLT3 or CD3 (i.e., the first binding domain is not capable of binding to proteins other than FLT3 and the second binding domain is not capable of binding to proteins other than CD3).

[0065] The term “does not essentially/substantially bind” or “is not capable of binding” means that a binding domain of the present invention does not bind a protein or antigen other than FLT3 or CD3, i.e., does not show reactivity of more than 30%, preferably not more than 20%, more preferably not more than 10%, particularly preferably not more than 9%, 8%, 7%, 6% or 5% with proteins or antigens other than FLT3 or CD3, whereby binding to FLT3 or CD3, respectively, is set to be 100%.

[0066] Specific binding is believed to be effected by specific motifs in the amino acid sequence of the binding domain and the antigen. Thus, binding is achieved as a result of their primary, secondary and/or tertiary structure as well as the result of secondary modifications of said structures. The specific interaction of the antigen-interaction-site with its specific antigen may result in a simple binding of said site to the antigen. Moreover, the specific interaction of the antigen-interaction-site with its specific antigen may alternatively or additionally result in the initiation of a signal, e.g. due to the induction of a change of the conformation of the antigen, an oligomerization of the antigen, etc.

[0067] In another aspect, the present invention provides a bispecific antibody construct comprising a first binding domain which binds to human FLT3 on the surface of a target cell and a second binding domain which binds to human CD3 on the surface of a T cell, wherein the first binding domain binds to an epitope of FLT3 which is comprised within the region of the human FLT3 having a sequence as depicted in SEQ ID NO: 814 (cluster 1) or SEQ ID NO: 816 (cluster 3).

[0068] Preferably, the first binding domain of the bispecific antibody construct of the invention comprises a VH region comprising CDR-H1, CDR-H2 and CDR-H3 and a VL region comprising CDR-L1, CDR-L2 and CDR-L3 selected from the group consisting of:

[0069] SEQ ID NOs: 151-156, SEQ ID NOs: 161-166, SEQ ID NOs: 171-176, SEQ ID NOs: 181-186, SEQ ID NOs: 191-196, SEQ ID NOs: 201-206, SEQ ID NOs: 211-216, SEQ ID NOs: 221-226, SEQ ID NOs: 231-236, SEQ ID NOs: 241-246, SEQ ID NOs: 251-256, SEQ ID NOs: 261-266, SEQ ID NOs: 271-276, SEQ ID NOs: 281-286, SEQ ID NOs: 291-296, SEQ ID NOs: 301-306, SEQ ID NOs: 311-316, SEQ ID NOs: 321-326, SEQ ID NOs: 331-336, SEQ ID NOs: 341-346, SEQ ID NOs: 351-356, SEQ ID NOs: 361-366, SEQ ID NOs: 371-376, SEQ ID NOs: 381-386, SEQ ID NOs: 391-396, SEQ ID NOs: 401-406, SEQ ID NOs: 411-416, SEQ ID NOs: 421-426, SEQ ID NOs: 431-436, SEQ ID NOs: 441-446, SEQ ID NOs: 451-456, SEQ ID NOs: 461-466, SEQ ID NOs: 471-476, SEQ ID NOs: 481-486, SEQ ID NOs: 491-496, SEQ ID NOs: 501-506, SEQ ID NOs: 511-516, SEQ ID NOs: 521-526, SEQ ID NOs: 531-536, SEQ ID NOs: 541-546, SEQ ID NOs: 551-556, SEQ ID NOs: 561-566, SEQ ID NOs: 571-576, SEQ ID NOs: 581-586, SEQ ID NOs: 591-596, SEQ ID NOs: 601-606, SEQ ID NOs: 611-616, SEQ ID NOs: 621-626, SEQ ID NOs: 631-636, SEQ ID NOs: 641-646, SEQ ID NOs: 651-656, SEQ ID NOs: 661-666, SEQ ID NOs: 671-676, SEQ ID NOs: 681-686, SEQ ID NOs: 691-696, SEQ ID NOs: 701-706, SEQ ID NOs: 711-716, SEQ ID NOs: 721-726, SEQ ID NOs: 731-736, SEQ ID NOs: 741-746, SEQ ID NOs: 751-756, SEQ ID NOs: 761-766, SEQ ID NOs: 771-776, SEQ ID NOs: 781-786, SEQ ID NOs: 791-796.

[0070] The term “variable” refers to the portions of the antibody or immunoglobulin domains that exhibit variability in their sequence and that are involved in determining the specificity and binding affinity of a particular antibody (i.e., the “variable domain(s)”). The pairing of a variable heavy chain (VH) and a variable light chain (VL) together forms a single antigen-binding site.

[0071] Variability is not evenly distributed throughout the variable domains of antibodies; it is concentrated in sub-domains of each of the heavy and light chain variable regions. These sub-domains are called “hypervariable regions” or “complementarity determining regions” (CDRs). The more conserved (i.e., non-hypervariable) portions of the variable domains are called the “framework” regions (FRM or FR) and provide a scaffold for the six CDRs in three dimensional space to form an antigen-binding surface. The variable domains of naturally occurring heavy and light chains each comprise four FRM regions (FR1, FR2, FR3, and FR4), largely adopting a β-sheet configuration, connected by three hypervariable regions, which form loops connecting, and in some cases forming part of, the β-sheet structure. The hypervariable regions in each chain are held together in close proximity by the FRM and, with the hypervariable regions from the other chain, contribute to the formation of the antigen-binding site (see Kabat et al., loc. cit.).

[0072] The terms “CDR”, and its plural “CDRs”, refer to the complementarity determining region of which three make up the binding character of a light chain variable region (CDR-L1, CDR-L2 and CDR-L3) and three make up the binding character of a heavy chain variable region (CDR-H1, CDR-H2 and CDR-H3). CDRs contain most of the residues responsible for specific interactions of the antibody with the antigen and hence contribute to the functional activity of an antibody molecule: they are the main determinants of antigen specificity.

[0073] The exact definitional CDR boundaries and lengths are subject to different classification and numbering systems. CDRs may therefore be referred to by Kabat, Chothia, contact or any other boundary definitions, including the numbering system described herein. Despite differing boundaries, each of these systems has some degree of overlap in what constitutes the so called “hypervariable regions” within the variable sequences. CDR definitions according to these systems may therefore differ in length and boundary areas with respect to the adjacent framework region. See for example Kabat (an approach based on cross-species sequence variability), Chothia (an approach based on crystallographic studies of antigen-antibody complexes), and/or MacCallum (Kabat et al., loc. cit.; Chothia et al., J. Mol. Biol, 1987, 196: 901-917; and MacCallum et al., J. Mol. Biol, 1996, 262: 732). Still another standard for characterizing the antigen binding site is the AbM definition used by Oxford Molecular's AbM antibody modeling software. See, e.g., Protein Sequence and Structure Analysis of Antibody Variable Domains. In: Antibody Engineering Lab Manual (Ed.: Duebel, S. and Kontermann, R., Springer-Verlag, Heidelberg). To the extent that two residue identification techniques define regions of overlapping, but not identical regions, they can be combined to define a hybrid CDR. However, the numbering in accordance with the so-called Kabat system is preferred.

[0074] Typically, CDRs form a loop structure that can be classified as a canonical structure. The term “canonical structure” refers to the main chain conformation that is adopted by the antigen binding (CDR) loops. From comparative structural studies, it has been found that five of the six antigen binding loops have only a limited repertoire of available conformations. Each canonical structure can be characterized by the torsion angles of the polypeptide backbone. Correspondent loops between antibodies may, therefore, have very similar three dimensional structures, despite high amino acid sequence variability in most parts of the loops (Chothia and Lesk, J. Mol. Biol., 1987, 196:901; Chothia et al., Nature, 1989, 342: 877; Martin and Thornton, J. Mol. Biol, 1996, 263: 800). Furthermore, there is a relationship between the adopted loop structure and the amino acid sequences surrounding it. The conformation of a particular canonical class is determined by the length of the loop and the amino acid residues residing at key positions within the loop, as well as within the conserved framework (i.e., outside of the loop). Assignment to a particular canonical class can therefore be made based on the presence of these key amino acid residues.

[0075] The term “canonical structure” may also include considerations as to the linear sequence of the antibody, for example, as catalogued by Kabat (Kabat et al., loc. cit.). The Kabat numbering scheme (system) is a widely adopted standard for numbering the amino acid residues of an antibody variable domain in a consistent manner and is the preferred scheme applied in the present invention as also mentioned elsewhere herein. Additional structural considerations can also be used to determine the canonical structure of an antibody. For example, those differences not fully reflected by Kabat numbering can be described by the numbering system of Chothia et al. and/or revealed by other techniques, for example, crystallography and two- or three-dimensional computational modeling. Accordingly, a given antibody sequence may be placed into a canonical class which allows for, among other things, identifying appropriate chassis sequences (e.g., based on a desire to include a variety of canonical structures in a library). Kabat numbering of antibody amino acid sequences and structural considerations as described by Chothia et al., loc. cit. and their implications for construing canonical aspects of antibody structure, are described in the literature. The subunit structures and three-dimensional configurations of different classes of immunoglobulins are well known in the art. For a review of the antibody structure, see Antibodies: A Laboratory Manual, Cold Spring Harbor Laboratory, eds. Harlow et al., 1988.

[0076] The CDR3 of the light chain and, particularly, the CDR3 of the heavy chain may constitute the most important determinants in antigen binding within the light and heavy chain variable regions. In some antibody constructs, the heavy chain CDR3 appears to constitute the major area of contact between the antigen and the antibody. In vitro selection schemes in which CDR3 alone is varied can be used to vary the binding properties of an antibody or determine which residues contribute to the binding of an antigen. Hence, CDR3 is typically the greatest source of molecular diversity within the antibody-binding site. H3, for example, can be as short as two amino acid residues or greater than 26 amino acids.

[0077] In a classical full-length antibody or immunoglobulin, each light (L) chain is linked to a heavy (H) chain by one covalent disulfide bond, while the two H chains are linked to each other by one or more disulfide bonds depending on the H chain isotype. The CH domain most proximal to VH is usually designated as CH1. The constant (“C”) domains are not directly involved in antigen binding, but exhibit various effector functions, such as antibody-dependent, cell-mediated cytotoxicity and complement activation. The Fc region of an antibody is comprised within the heavy chain constant domains and is for example able to interact with cell surface located Fc receptors.

[0078] The sequence of antibody genes after assembly and somatic mutation is highly varied, and these varied genes are estimated to encode 10¹⁰ different antibody molecules (Immunoglobulin Genes, 2^{nd} ed., eds. Jonio et al., Academic Press, San Diego, Calif., 1995). Accordingly, the immune system provides a repertoire of immunoglobulins. The term “repertoire” refers to at least one nucleotide sequence derived wholly or partially from at least one sequence encoding at least one immunoglobulin. The sequence(s) may be generated by rearrangement in vivo of the V, D, and J segments of heavy chains, and the V and J segments of light chains. Alternatively, the sequence(s) can be generated from a cell in response to which rearrangement occurs, e.g., in vitro stimulation. Alternatively, part or all of the sequence(s) may be obtained by DNA splicing, nucleotide synthesis, mutagenesis, and other methods, see, e.g., U.S. Pat. No. 5,565,332. A repertoire may include only one sequence or may include a plurality of sequences, including ones in a genetically diverse collection.

[0079] A preferred antibody construct according to the invention can also be defined as a bispecific antibody construct comprising a first (preferably human) binding domain which binds to human FLT3 on the surface of a target cell and a second binding domain which binds to human CD3 on the surface of a T cell, wherein the first binding domain binds to the same epitope of FLT3 as an antibody selected from the group consisting of FL-1 to FL-65, i.e., an antibody comprising a VH region comprising CDR-H1, CDR-H2 and CDR-H3 and a VL region comprising CDR-L1, CDR-L2 and CDR-L3 selected from the group consisting of:

[0080] SEQ ID NOs: 151-156, SEQ ID NOs: 161-166, SEQ ID NOs: 171-176, SEQ ID NOs: 181-186, SEQ ID NOs: 191-196, SEQ ID NOs: 201-206, SEQ ID NOs: 211-216, SEQ ID NOs: 221-226, SEQ ID NOs: 231-236, SEQ ID NOs: 241-246, SEQ ID NOs: 251-256, SEQ ID NOs: 261-266, SEQ ID NOs: 271-276, SEQ ID NOs: 281-286, SEQ ID NOs: 291-296, SEQ ID NOs: 301-306, SEQ ID NOs: 311-316, SEQ ID NOs: 321-326, SEQ ID NOs: 331-336, SEQ ID NOs: 341-346, SEQ ID NOs: 351-356, SEQ ID NOs: 361-366, SEQ ID NOs: 371-376, SEQ ID NOs: 381-386, SEQ ID NOs: 391-396, SEQ ID NOs: 401-406, SEQ ID NOs: 411-416, SEQ ID NOs: 421-426, SEQ ID NOs: 431-436, SEQ ID NOs: 441-446, SEQ ID NOs: 451-456, SEQ ID NOs: 461-466, SEQ ID NOs: 471-476, SEQ ID NOs: 481-486, SEQ ID NOs: 491-496, SEQ ID NOs: 501-506, SEQ ID NOs: 511-516, SEQ ID NOs: 521-526, SEQ ID NOs: 531-536, SEQ ID NOs: 541-546, SEQ ID NOs: 551-556, SEQ ID NOs: 561-566, SEQ ID NOs: 571-576, SEQ ID NOs: 581-586, SEQ ID NOs: 591-596, SEQ ID NOs: 601-606, SEQ ID NOs: 611-616, SEQ ID NOs: 621-626, SEQ ID NOs: 631-636, SEQ ID NOs: 641-646, SEQ ID NOs: 651-656, SEQ ID NOs: 661-666, SEQ ID NOs: 671-676, SEQ ID NOs: 681-686, SEQ ID NOs: 691-696, SEQ ID NOs: 701-706, SEQ ID NOs: 711-716, SEQ ID NOs: 721-726, SEQ ID NOs: 731-736, SEQ ID NOs: 741-746, SEQ ID NOs: 751-756, SEQ ID NOs: 761-766, SEQ ID NOs: 771-776, SEQ ID NOs: 781-786, SEQ ID NOs: 791-796.

[0081] Whether or not an antibody construct binds to the same epitope of FLT3 as another given antibody construct can be measured e.g. by epitope mapping with chimeric or truncated target molecules, e.g. as described herein above and in in the appended Examples.

[0082] A preferred antibody construct according to the invention can also be defined as a bispecific antibody construct comprising a first (preferably human) binding domain which binds to human FLT3 on the surface of a target cell and a second binding domain which binds to human CD3 on the surface of a T cell, wherein the first binding domain competes for binding with an antibody selected from the group consisting of FL-1 to FL-65, i.e., an antibody comprising a VH region comprising CDR-H1, CDR-H2 and CDR-H3 and a VL region comprising CDR-L1, CDR-L2 and CDR-L3 selected from the group consisting of those described above.

[0083] Whether or not an antibody construct competes for binding with another given antibody construct can be measured in a competition assay such as a competitive ELISA or a cell-based competition assay. Avidin-coupled microparticles (beads) can also be used. Similar to an avidin-coated ELISA plate, when reacted with a biotinylated protein, each of these beads can be used as a substrate on which an assay can be performed. Antigen is coated onto a bead and then precoated with the first antibody. The second antibody is added and any additional binding is determined. Possible means for the read-out includes flow cytometry.

[0084] In one embodiment, the first binding domain of the antibody construct of the invention comprises a VH region selected from the group consisting of those depicted in SEQ ID NO: 157, SEQ ID NO: 167, SEQ ID NO: 177, SEQ ID NO: 187, SEQ ID NO: 197, SEQ ID NO: 207, SEQ ID NO: 217, SEQ ID NO: 227, SEQ ID NO: 237, SEQ ID NO: 247, SEQ ID NO: 257, SEQ ID NO: 267, SEQ ID NO: 277, SEQ ID NO: 287, SEQ ID NO: 297, SEQ ID NO: 307, SEQ ID NO: 317, SEQ ID NO: 327, SEQ ID NO: 337, SEQ ID NO: 347, SEQ ID NO: 357, SEQ ID NO: 367, SEQ ID NO: 377, SEQ ID NO: 387, SEQ ID NO: 397, SEQ ID NO: 407, SEQ ID NO: 417, SEQ ID NO: 427, SEQ ID NO: 437, SEQ ID NO: 447, SEQ ID NO: 457, SEQ ID NO: 467, SEQ ID NO: 477, SEQ ID NO: 487, SEQ ID NO: 497, SEQ ID NO: 507, SEQ ID NO: 517, SEQ ID NO: 527, SEQ ID NO: 537, SEQ ID NO: 547, SEQ ID NO: 557, SEQ ID NO: 567, SEQ ID NO: 577, SEQ ID NO: 587, SEQ ID NO: 597, SEQ ID NO: 607, SEQ ID NO: 617, SEQ ID NO: 627, SEQ ID NO: 637, SEQ ID NO: 647, SEQ ID NO: 657, SEQ ID NO: 667, SEQ ID NO: 677, SEQ ID NO: 687, SEQ ID NO: 697, SEQ ID NO: 707, SEQ ID NO: 717, SEQ ID NO: 727, SEQ ID NO: 737, SEQ ID NO: 747, SEQ ID NO: 757, SEQ ID NO: 767, SEQ ID NO: 777, SEQ ID NO: 787, and SEQ ID NO: 797.

[0085] In a further embodiment, the first binding domain of the antibody construct of the invention comprises a VL region selected from the group consisting of those depicted in SEQ ID NO: 158, SEQ ID NO: 168, SEQ ID NO: 178, SEQ ID NO: 188, SEQ ID NO: 198, SEQ ID NO: 208, SEQ ID NO: 218, SEQ ID NO: 228, SEQ ID NO: 238, SEQ ID NO: 248, SEQ ID NO: 258, SEQ ID NO: 268, SEQ ID NO: 278, SEQ ID NO: 288, SEQ ID NO: 298, SEQ ID NO: 308, SEQ ID NO: 318, SEQ ID NO: 328, SEQ ID NO: 338, SEQ ID NO: 348, SEQ ID NO: 358, SEQ ID NO: 368, SEQ ID NO: 378, SEQ ID NO: 388, SEQ ID NO: 398, SEQ ID NO: 408, SEQ ID NO: 418, SEQ ID NO: 428, SEQ ID NO: 438, SEQ ID NO: 448, SEQ ID NO: 458, SEQ ID NO: 468, SEQ ID NO: 478, SEQ ID NO: 488, SEQ ID NO: 498, SEQ ID NO: 508, SEQ ID NO: 518, SEQ ID NO: 528, SEQ ID NO: 538, SEQ ID NO: 548, SEQ ID NO: 558, SEQ ID NO: 568, SEQ ID NO: 578, SEQ ID NO: 588, SEQ ID NO: 598, SEQ ID NO: 608, SEQ ID NO: 618, SEQ ID NO: 628, SEQ ID NO: 638, SEQ ID NO: 648, SEQ ID NO: 658, SEQ ID NO: 668, SEQ ID NO: 678, SEQ ID NO: 688, SEQ ID NO: 698, SEQ ID NO: 708, SEQ ID NO: 718, SEQ ID NO: 728, SEQ ID NO: 738, SEQ ID NO: 748, SEQ ID NO: 758, SEQ ID NO: 768, SEQ ID NO: 778, SEQ ID NO: 788, and SEQ ID NO: 798.

[0086] In another embodiment, the first binding domain of the antibody construct of the invention comprises a VH region and a VL region selected from the group consisting of pairs of a VH region and a VL region as depicted in SEQ ID NO: 157+158, SEQ ID NO: 167+168, SEQ ID NO: 177+178, SEQ ID NO: 187+188, SEQ ID NO: 197+198, SEQ ID NO: 207+208, SEQ ID NO: 217+218, SEQ ID NO: 227+228, SEQ ID NO: 237+238, SEQ ID NO: 247+248, SEQ ID NO: 257+258, SEQ ID NO: 267+268, SEQ ID NO: 277+278, SEQ ID NO: 287+288, SEQ ID NO: 297+298, SEQ ID NO: 307+308, SEQ ID NO: 317+318, SEQ ID NO: 327+328, SEQ ID NO: 337+338, SEQ ID NO: 347+348, SEQ ID NO: 357+358, SEQ ID NO: 367+368, SEQ ID NO: 377+378, SEQ ID NO: 387+388, SEQ ID NO: 397+398, SEQ ID NO: 407+408, SEQ ID NO: 417+418, SEQ ID NO: 427+428, SEQ ID NO: 437+438, SEQ ID NO: 447+448, SEQ ID NO: 457+458, SEQ ID NO: 467+468, SEQ ID NO: 477+478, SEQ ID NO: 487+488, SEQ ID NO: 497+498, SEQ ID NO: 507+508, SEQ ID NO: 517+518, SEQ ID NO: 527+528, SEQ ID NO: 537+538, SEQ ID NO: 547+548, SEQ ID NO: 557+558, SEQ ID NO: 567+568, SEQ ID NO: 577+578, SEQ ID NO: 587+588, SEQ ID NO: 597+598, SEQ ID NO: 607+608, SEQ ID NO: 617+618, SEQ ID NO: 627+628, SEQ ID NO: 637+638, SEQ ID NO: 647+648, SEQ ID NO: 657+658, SEQ ID NO: 667+668, SEQ ID NO: 677+678, SEQ ID NO: 687+688, SEQ ID NO: 697+698, SEQ ID NO: 707+708, SEQ ID NO: 717+718, SEQ ID NO: 727+728, SEQ ID NO: 737+738, SEQ ID NO: 747+748, SEQ ID NO: 757+758, SEQ ID NO: 767+768, SEQ ID NO: 777+778, SEQ ID NO: 787+788, and SEQ ID NO: 797+798.

[0087] In yet a further embodiment, the first binding domain of the antibody construct of the invention comprises a polypeptide selected from the group consisting of those depicted in SEQ ID NO: 159, SEQ ID NO: 169, SEQ ID NO: 179, SEQ ID NO: 189, SEQ ID NO: 199, SEQ ID NO: 209, SEQ ID NO: 219, and SEQ ID NO: 229, SEQ ID NO: 239, SEQ ID NO: 249, and SEQ ID NO: 259, SEQ ID NO: 269, SEQ ID NO: 279, and SEQ ID NO: 289, SEQ ID NO: 299, SEQ ID NO: 309, SEQ ID NO: 319, and SEQ ID NO: 329, SEQ ID NO: 339, SEQ ID NO: 349, and SEQ ID NO: 359, SEQ ID NO: 369, SEQ ID NO: 379, and SEQ ID NO: 389, SEQ ID NO: 399, SEQ ID NO: 409, SEQ ID NO: 419, and SEQ ID NO: 429, SEQ ID NO: 439, SEQ ID NO: 449, and SEQ ID NO: 459, SEQ ID NO: 469, SEQ ID NO: 479, and SEQ ID NO: 489, SEQ ID NO: 499, SEQ ID NO: 509, SEQ ID NO: 519, and SEQ ID NO: 529, SEQ ID NO: 539, SEQ ID NO: 549, and SEQ ID NO: 559, SEQ ID NO: 569, SEQ ID NO: 579, and SEQ ID NO: 589, SEQ ID NO: 599, SEQ ID NO: 609, SEQ ID NO: 619, and SEQ ID NO: 629, SEQ ID NO: 639, SEQ ID NO: 649, and SEQ ID NO: 659, SEQ ID NO: 669, SEQ ID NO: 679, and SEQ ID NO: 689, SEQ ID NO: 699, SEQ ID NO: 709, SEQ ID NO: 719, and SEQ ID NO: 729, SEQ ID NO: 739, SEQ ID NO: 749, and SEQ ID NO: 759, SEQ ID NO: 769, SEQ ID NO: 779, and SEQ ID NO: 789, and SEQ ID NO: 799.

[0088] The above first binding domains (which are specified by their CDRs, VH region and VL region and combinations thereof) characterize as binding domains which bind to an epitope of FLT3 which is comprised within the region as depicted in SEQ ID NO: 819.

[0089] The term “bispecific” as used herein refers to an antibody construct which is “at least bispecific”, i.e., it comprises at least a first binding domain and a second binding domain, wherein the first binding domain binds to one antigen or target (here: FLT3), and the second binding domain binds to another antigen or target (here: CD3). Accordingly, antibody constructs according to the invention comprise specificities for at least two different antigens or targets. The term “bispecific antibody construct” of the invention also encompasses multispecific antibody constructs such as trispecific antibody constructs, the latter ones including three binding domains, or constructs having more than three (e.g. four, five . . . ) specificites.

[0090] Given that the antibody constructs according to the invention are (at least) bispecific, they do not occur naturally and they are markedly different from naturally occurring products. A “bispecific” antibody construct or immunoglobulin is hence an artificial hybrid antibody or immunoglobulin having at least two distinct binding sites with different specificities. Bispecific antibody constructs can be produced by a variety of methods including fusion of hybridomas or linking of Fab′ fragments. See, e.g., Songsivilai & Lachmann, Clin. Exp. Immunol. 79:315-321 (1990).

[0091] The at least two binding domains and the variable domains of the antibody construct of the present invention may or may not comprise peptide linkers (spacer peptides). The term “peptide linker” comprises in accordance with the present invention an amino acid sequence by which the amino acid sequences of one (variable and/or binding) domain and another (variable and/or binding) domain of the antibody construct of the invention are linked with each other. An essential technical feature of such peptide linker is that it does not comprise any polymerization activity. Among the suitable peptide linkers are those described in U.S. Pat. Nos. 4,751,180 and 4,935,233 or WO 88/09344. The peptide linkers can also be used to attach other domains or modules or regions (such as half-life extending domains) to the antibody construct of the invention.

[0092] In the event that a linker is used, this linker is preferably of a length and sequence sufficient to ensure that each of the first and second domains can, independently from one another, retain their differential binding specificities. For peptide linkers which connect the at least two binding domains (or two variable domains) in the antibody construct of the invention, those peptide linkers are preferred which comprise only a few number of amino acid residues, e.g. 12 amino acid residues or less. Thus, peptide linkers of 12, 11, 10, 9, 8, 7, 6 or 5 amino acid residues are preferred. An envisaged peptide linker with less than 5 amino acids comprises 4, 3, 2 or one amino acid(s), wherein Gly-rich linkers are preferred. A particularly preferred “single” amino acid in the context of said “peptide linker” is Gly. Accordingly, said peptide linker may consist of the single amino acid Gly. Another preferred embodiment of a peptide linker is characterized by the amino acid sequence Gly-Gly-Gly-Gly-Ser, i.e. Gly₄Ser (SEQ ID NO: 1), or polymers thereof, i.e. (Gly₄Ser)x, where x is an integer of 1 or greater (e.g. 2 or 3). Preferred linkers are depicted in SEQ ID NOs: 1-9. The characteristics of said peptide linker, which comprise the absence of the promotion of secondary structures, are known in the art and are described e.g. in Dall'Acqua et al. (Biochem. (1998) 37, 9266-9273), Cheadle et al. (Mol Immunol (1992) 29, 21-30) and Raag and Whitlow (FASEB (1995) 9(1), 73-80). Peptide linkers which furthermore do not promote any secondary structures are preferred. The linkage of said domains to each other can be provided, e.g., by genetic engineering, as described in the examples. Methods for preparing fused and operatively linked bispecific single chain constructs and expressing them in mammalian cells or bacteria are well-known in the art (e.g. WO 99/54440 or Sambrook et al., Molecular Cloning: A Laboratory Manual, Cold Spring Harbor Laboratory Press, Cold Spring Harbor, N.Y., 2001).

[0093] As described herein above, the invention provides a preferred embodiment wherein the antibody construct is in a format selected from the group consisting of (scFv)₂, scFv-single domain mAb, diabodies and oligomers of any of the those formats.

[0094] According to a particularly preferred embodiment, and as documented in the appended examples, the antibody construct of the invention is a “bispecific single chain antibody construct”, more preferably a bispecific “single chain Fv” (scFv). Although the two domains of the Fv fragment, VL and VH, are coded for by separate genes, they can be joined, using recombinant methods, by a synthetic linker—as described hereinbefore—that enables them to be made as a single protein chain in which the VL and VH regions pair to form a monovalent molecule; see e.g., Huston et al. (1988) Proc. Natl. Acad. Sci USA 85:5879-5883). These antibody fragments are obtained using conventional techniques known to those with skill in the art, and the fragments are evaluated for function in the same manner as are whole or full-length antibodies. A single-chain variable fragment (scFv) is hence a fusion protein of the variable region of the heavy chain (VH) and of the light chain (VL) of immunoglobulins, usually connected with a short linker peptide of about ten to about 25 amino acids, preferably about 15 to 20 amino acids. The linker is usually rich in glycine for flexibility, as well as serine or threonine for solubility, and can either connect the N-terminus of the VH with the C-terminus of the VL, or vice versa. This protein retains the specificity of the original immunoglobulin, despite removal of the constant regions and introduction of the linker.

[0095] Bispecific single chain molecules are known in the art and are described in WO99/54440, Mack, J. Immunol. (1997), 158, 3965-3970, Mack, PNAS, (1995), 92, 7021-7025, Kufer, Cancer Immunol. Immunother., (1997), 45, 193-197, Löffler, Blood, (2000), 95, 6, 2098-2103, Brühl, Immunol., (2001), 166, 2420-2426, Kipriyanov, J. Mol. Biol., (1999), 293, 41-56. Techniques described for the production of single chain antibodies (see, inter alia, U.S. Pat. No. 4,946,778, Kontermann and Dübel (2010), loc. cit. and Little (2009), loc. cit.) can be adapted to produce single chain antibody constructs specifically recognizing (an) elected target(s).

[0096] Bivalent (also called divalent) or bispecific single-chain variable fragments (bi-scFvs or di-scFvs having the format (scFv)₂ can be engineered by linking two scFv molecules (e.g. with linkers as described hereinbefore). If these two scFv molecules have the same binding specificity, the resulting (scFv)₂ molecule will preferably be called bivalent (i.e. it has two valences for the same target epitope). If the two scFv molecules have different binding specificities, the resulting (scFv)₂ molecule will preferably be called bispecific. The linking can be done by producing a single peptide chain with two VH regions and two VL regions, yielding tandem scFvs (see e.g. Kufer P. et al., (2004) Trends in Biotechnology 22(5):238-244). Another possibility is the creation of scFv molecules with linker peptides that are too short for the two variable regions to fold together (e.g. about five amino acids), forcing the scFvs to dimerize. This type is known as diabodies (see e.g. Hollinger, Philipp et al., (July 1993) Proceedings of the National Academy of Sciences of the United States of America 90 (14): 6444-8.).

[0097] According to an also preferred embodiment of the antibody construct of the invention the heavy chain (VH) and of the light chain (VL) of a binding domain binding either to the target antigen FLT3 or CD3 are not directly connected via an above described peptide linker but the binding domain is formed due to the formation of a bispecifc molecule as described for the diabody. Thus, the VH chain of the CD3 binding domain may be fused to the VL of the FLT3 binding domain via such peptide linker, while the VH chain of the FLT3 binding domain is fused to the VL of the CD3 binding domain via such peptide linker.

[0098] Single domain antibodies comprise merely one (monomeric) antibody variable domain which is able to bind selectively to a specific antigen, independently of other V regions or domains. The first single domain antibodies were engineered from heavy chain antibodies found in camelids, and these are called V_{H}H fragments. Cartilaginous fishes also have heavy chain antibodies (IgNAR) from which single domain antibodies called V_{NAR} fragments can be obtained. An alternative approach is to split the dimeric variable domains from common immunoglobulins e.g. from humans or rodents into monomers, hence obtaining VH or VL as a single domain Ab. Although most research into single domain antibodies is currently based on heavy chain variable domains, nanobodies derived from light chains have also been shown to bind specifically to target epitopes. Examples of single domain antibodies are called sdAb, nanobodies or single variable domain antibodies.

[0099] A (single domain mAb)₂ is hence a monoclonal antibody construct composed of (at least) two single domain monoclonal antibodies, which are individually selected from the group comprising VH, VL, V_{H}H and V_{NAR}. The linker is preferably in the form of a peptide linker. Similarly, an “scFv-single domain mAb” is a monoclonal antibody construct composed of at least one single domain antibody as described above and one scFv molecule as described above. Again, the linker is preferably in the form of a peptide linker.

[0100] It is furthermore envisaged that the present invention provides a bispecific antibody construct comprising a first binding domain which binds to human FLT3 on the surface of a target cell and a second binding domain which binds to human CD3 on the surface of a T cell, wherein the first binding domain binds to an epitope of FLT3 which is comprised within the region as depicted in SEQ ID NO: 819 (cluster 1).

[0101] Accordingly, in a further aspect of the invention, the first binding domain of the bispecific antibody construct comprises a VH region comprising CDR-H1, CDR-H2 and CDR-H3 and a VL region comprising CDR-L1, CDR-L2 and CDR-L3 selected from the group consisting of:

SEQ ID NOs: 151-156, SEQ ID NOs: 161-166, SEQ ID NOs: 171-176, SEQ ID NOs: 181-186, SEQ ID NOs: 191-196, SEQ ID NOs: 201-206, SEQ ID NOs: 211-216, SEQ ID NOs: 221-226, SEQ ID NOs: 231-236, SEQ ID NOs: 241-246, SEQ ID NOs: 251-256, SEQ ID NOs: 261-266, SEQ ID NOs: 271-276, SEQ ID NOs: 281-286, SEQ ID NOs: 291-296, SEQ ID NOs: 301-306, SEQ ID NOs: 311-316, SEQ ID NOs: 321-326, SEQ ID NOs: 331-336, SEQ ID NOs: 341-346, SEQ ID NOs: 351-356, SEQ ID NOs: 361-366, SEQ ID NOs: 371-376, SEQ ID NOs: 381-386, SEQ ID NOs: 391-396, SEQ ID NOs: 401-406, SEQ ID NOs: 411-416, SEQ ID NOs: 421-426, SEQ ID NOs: 431-436, SEQ ID NOs: 441-446, SEQ ID NOs: 451-456, SEQ ID NOs: 461-466, SEQ ID NOs: 471-476, SEQ ID NOs: 481-486, SEQ ID NOs: 491-496, SEQ ID NOs: 501-506, SEQ ID NOs: 511-516, SEQ ID NOs: 521-526, SEQ ID NOs: 531-536, SEQ ID NOs: 541-546, SEQ ID NOs: 551-556, SEQ ID NOs: 561-566, SEQ ID NOs: 571-576, SEQ ID NOs: 581-586, SEQ ID NOs: 591-596, SEQ ID NOs: 601-606, SEQ ID NOs: 611-616, SEQ ID NOs: 621-626, SEQ ID NOs: 631-636, SEQ ID NOs: 641-646, SEQ ID NOs: 651-656, SEQ ID NOs: 661-666, SEQ ID NOs: 671-676, SEQ ID NOs: 681-686, SEQ ID NOs: 691-696, SEQ ID NOs: 701-706, SEQ ID NOs: 711-716, SEQ ID NOs: 721-726, SEQ ID NOs: 731-736, SEQ ID NOs: 741-746, SEQ ID NOs: 791-796.

[0102] In one embodiment, the first binding domain of the antibody construct of the invention comprises a VH region selected from the group consisting of those depicted in SEQ ID NO: 157, SEQ ID NO: 167, SEQ ID NO: 177, SEQ ID NO: 187, SEQ ID NO: 197, SEQ ID NO: 207, SEQ ID NO: 217, SEQ ID NO: 227, SEQ ID NO: 237, SEQ ID NO: 247, SEQ ID NO: 257, SEQ ID NO: 267, SEQ ID NO: 277, SEQ ID NO: 287, SEQ ID NO: 297, SEQ ID NO: 307, SEQ ID NO: 317, SEQ ID NO: 327, SEQ ID NO: 337, SEQ ID NO: 347, SEQ ID NO: 357, SEQ ID NO: 367, SEQ ID NO: 377, SEQ ID NO: 387, SEQ ID NO: 397, SEQ ID NO: 407, SEQ ID NO: 417, SEQ ID NO: 427, SEQ ID NO: 437, SEQ ID NO: 447, SEQ ID NO: 457, SEQ ID NO: 467, SEQ ID NO: 477, SEQ ID NO: 487, SEQ ID NO: 497, SEQ ID NO: 507, SEQ ID NO: 517, SEQ ID NO: 527, SEQ ID NO: 537, SEQ ID NO: 547, SEQ ID NO: 557, SEQ ID NO: 567, SEQ ID NO: 577, SEQ ID NO: 587, SEQ ID NO: 597, SEQ ID NO: 607, SEQ ID NO: 617, SEQ ID NO: 627, SEQ ID NO: 637, SEQ ID NO: 647, SEQ ID NO: 657, SEQ ID NO: 667, SEQ ID NO: 697, SEQ ID NO: 707, SEQ ID NO: 717, SEQ ID NO: 727, SEQ ID NO: 737, SEQ ID NO: 747, and SEQ ID NO: 797.

[0103] In a further embodiment, the first binding domain of the antibody construct of the invention comprises a VL region selected from the group consisting of those depicted in SEQ ID NO: 158, SEQ ID NO: 168, SEQ ID NO: 178, SEQ ID NO: 188, SEQ ID NO: 198, SEQ ID NO: 208, SEQ ID NO: 218, SEQ ID NO: 228, SEQ ID NO: 238, SEQ ID NO: 248, SEQ ID NO: 258, SEQ ID NO: 268, SEQ ID NO: 278, SEQ ID NO: 288, SEQ ID NO: 298, SEQ ID NO: 308, SEQ ID NO: 318, SEQ ID NO: 328, SEQ ID NO: 338, SEQ ID NO: 348, SEQ ID NO: 358, SEQ ID NO: 368, SEQ ID NO: 378, SEQ ID NO: 388, SEQ ID NO: 398, SEQ ID NO: 408, SEQ ID NO: 418, SEQ ID NO: 428, SEQ ID NO: 438, SEQ ID NO: 448, SEQ ID NO: 458, SEQ ID NO: 468, SEQ ID NO: 478, SEQ ID NO: 488, SEQ ID NO: 498, SEQ ID NO: 508, SEQ ID NO: 518, SEQ ID NO: 528, SEQ ID NO: 538, SEQ ID NO: 548, SEQ ID NO: 558, SEQ ID NO: 568, SEQ ID NO: 578, SEQ ID NO: 588, SEQ ID NO: 598, SEQ ID NO: 608, SEQ ID NO: 618, SEQ ID NO: 628, SEQ ID NO: 638, SEQ ID NO: 648, SEQ ID NO: 658, SEQ ID NO: 668, SEQ ID NO: 698, SEQ ID NO: 708, SEQ ID NO: 718, SEQ ID NO: 728, SEQ ID NO: 738, SEQ ID NO: 748, and SEQ ID NO: 798.

[0104] In another embodiment, the first binding domain of the antibody construct of the invention comprises a VH region and a VL region selected from the group consisting of pairs of a VH region and a VL region as depicted in SEQ ID NO: 157+158, SEQ ID NO: 167+168, SEQ ID NO: 177+178, SEQ ID NO: 187+188, SEQ ID NO: 197+198, SEQ ID NO: 207+208, SEQ ID NO: 217+218, SEQ ID NO: 227+228, SEQ ID NO: 237+238, SEQ ID NO: 247+248, SEQ ID NO: 257+258, SEQ ID NO: 267+268, SEQ ID NO: 277+278, SEQ ID NO: 287+288, SEQ ID NO: 297+298, SEQ ID NO: 307+308, SEQ ID NO: 317+318, SEQ ID NO: 327+328, SEQ ID NO: 337+338, SEQ ID NO: 347+348, SEQ ID NO: 357+358, SEQ ID NO: 367+368, SEQ ID NO: 377+378, SEQ ID NO: 387+388, SEQ ID NO: 397+398, SEQ ID NO: 407+408, SEQ ID NO: 417+418, SEQ ID NO: 427+428, SEQ ID NO: 437+438, SEQ ID NO: 447+448, SEQ ID NO: 457+458, SEQ ID NO: 467+468, SEQ ID NO: 477+478, SEQ ID NO: 487+488, SEQ ID NO: 497+498, SEQ ID NO: 507+508, SEQ ID NO: 517+518, SEQ ID NO: 527+528, SEQ ID NO: 537+538, SEQ ID NO: 547+548, SEQ ID NO: 557+558, SEQ ID NO: 567+568, SEQ ID NO: 577+578, SEQ ID NO: 587+588, SEQ ID NO: 597+598, SEQ ID NO: 607+608, SEQ ID NO: 617+618, SEQ ID NO: 627+628, SEQ ID NO: 637+638, SEQ ID NO: 647+648, SEQ ID NO: 657+658, SEQ ID NO: 667+668, SEQ ID NO: 697+698, SEQ ID NO: 707+708, SEQ ID NO: 717+718, SEQ ID NO: 727+728, SEQ ID NO: 737+738, SEQ ID NO: 747+748, and SEQ ID NO: 797+798.

[0105] In a further embodiment, the first binding domain of the antibody construct of the invention comprises a polypeptide selected from the group consisting of those depicted in SEQ ID NO: 159, SEQ ID NO: 169, SEQ ID NO: 179, SEQ ID NO: 189, SEQ ID NO: 199, SEQ ID NO: 209, SEQ ID NO: 219, and SEQ ID NO: 229, SEQ ID NO: 239, SEQ ID NO: 249, SEQ ID NO: 259, SEQ ID NO: 269, SEQ ID NO: 279, and SEQ ID NO: 289, SEQ ID NO: 299, SEQ ID NO: 309, SEQ ID NO: 319, SEQ ID NO: 329, SEQ ID NO: 339, SEQ ID NO: 349, SEQ ID NO: 359, SEQ ID NO: 369, SEQ ID NO: 379, and SEQ ID NO: 389, SEQ ID NO: 399, SEQ ID NO: 409, SEQ ID NO: 419, and SEQ ID NO: 429, SEQ ID NO: 439, SEQ ID NO: 449, SEQ ID NO: 459, SEQ ID NO: 469, SEQ ID NO: 479, and SEQ ID NO: 489, SEQ ID NO: 499, SEQ ID NO: 509, SEQ ID NO: 519, and SEQ ID NO: 529, SEQ ID NO: 539, SEQ ID NO: 549, SEQ ID NO: 559, SEQ ID NO: 569, SEQ ID NO: 579, and SEQ ID NO: 589, SEQ ID NO: 599, SEQ ID NO: 609, SEQ ID NO: 619, and SEQ ID NO: 629, SEQ ID NO: 639, SEQ ID NO: 649, SEQ ID NO: 659, SEQ ID NO: 669, SEQ ID NO: 699, SEQ ID NO: 709, SEQ ID NO: 719, and SEQ ID NO: 729, SEQ ID NO: 739, SEQ ID NO: 749, and SEQ ID NO: 799.

[0106] It is also envisaged that the present invention provides a bispecific antibody construct comprising a first binding domain which binds to human FLT3 on the surface of a target cell and a second binding domain which binds to human CD3 on the surface of a T cell, wherein the first binding domain binds to an epitope of FLT3 which is comprised within the region as depicted in SEQ ID NO: 821 (cluster 3).

[0107] Accordingly, in a further aspect of the invention, the first binding domain of the bispecific antibody construct comprises a VH region comprising CDR-H1, CDR-H2 and CDR-H3 and a VL region comprising CDR-L1, CDR-L2 and CDR-L3 as follows:

[0108] SEQ ID NOs: 671-676, SEQ ID NOs: 681-686, SEQ ID NOs: 751-756, SEQ ID NOs: 761-766, SEQ ID NOs: 771-776, and SEQ ID NOs: 781-786.

[0109] In one embodiment, the first binding domain of the antibody construct of the invention comprises a VH region depicted in SEQ ID NO: 677, SEQ ID NO: 687, SEQ ID NO: 757, SEQ ID NO: 767, SEQ ID NO: 777, and SEQ ID NO: 787.

[0110] In a further embodiment, the first binding domain of the antibody construct of the invention comprises a VL region depicted in SEQ ID NO: 678, SEQ ID NO: 688, SEQ ID NO: 758, SEQ ID NO: 768, SEQ ID NO: 778, and SEQ ID NO: 788.

[0111] In another embodiment, the first binding domain of the antibody construct of the invention comprises a VH region and a VL region selected from the group consisting of pairs of a VH region and a VL region as depicted in SEQ ID NO: 677+678, SEQ ID NO: 687+688, SEQ ID NO: 757+758, SEQ ID NO: 767+768, SEQ ID NO: 777+778, and SEQ ID NO: 787+788.

[0112] In a further embodiment, the first binding domain of the antibody construct of the invention comprises a polypeptide selected from the group consisting of those depicted in SEQ ID NO: 679, and SEQ ID NO: 689, SEQ ID NO: 759, SEQ ID NO: 769, SEQ ID NO: 779, and SEQ ID NO: 789.

[0113] Another preferred antibody construct according to the invention can also be defined as a bispecific antibody construct comprising a first (preferably human) binding domain which binds to human FLT3 on the surface of a target cell and a second binding domain which binds to human CD3 on the surface of a T cell, wherein the first binding domain competes for binding with an antibody selected from the group consisting of FL-1 to FL-53, FL-55 to FL-60 and FL-65, i.e., an antibody comprising a VH region comprising CDR-H1, CDR-H2 and CDR-H3 and a VL region comprising CDR-L1, CDR-L2 and CDR-L3 selected from the group consisting of those described above.

[0114] T cells or T lymphocytes are a type of lymphocyte (itself a type of white blood cell) that play a central role in cell-mediated immunity. There are several subsets of T cells, each with a distinct function. T cells can be distinguished from other lymphocytes, such as B cells and NK cells, by the presence of a T cell receptor (TCR) on the cell surface. The TCR is responsible for recognizing antigens bound to major histocompatibility complex (MHC) molecules and is composed of two different protein chains. In 95% of the T cells, the TCR consists of an alpha (α) and beta (13) chain. When the TCR engages with antigenic peptide and MHC (peptide/MHC complex), the T lymphocyte is activated through a series of biochemical events mediated by associated enzymes, co-receptors, specialized adaptor molecules, and activated or released transcription factors

[0115] The CD3 receptor complex is a protein complex and is composed of four chains. In mammals, the complex contains a CD3γ (gamma) chain, a CD3δ (delta) chain, and two CD3ε (epsilon) chains. These chains associate with the T cell receptor (TCR) and the so-called ζ (zeta) chain to form the T cell receptor CD3 complex and to generate an activation signal in T lymphocytes. The CD3γ (gamma), CD3δ (delta), and CD3ε (epsilon) chains are highly related cell-surface proteins of the immunoglobulin superfamily containing a single extracellular immunoglobulin domain. The intracellular tails of the CD3 molecules contain a single conserved motif known as an immunoreceptor tyrosine-based activation motif or ITAM for short, which is essential for the signaling capacity of the TCR. The CD3 epsilon molecule is a polypeptide which in humans is encoded by the CD3E gene which resides on chromosome 11. The most preferred epitope of CD3 epsilon is comprised within amino acid residues 1-27 of the human CD3 epsilon extracellular domain.

[0116] The redirected lysis of target cells via the recruitment of T cells by a multispecific, at least bispecific, antibody construct involves cytolytic synapse formation and delivery of perforin and granzymes. The engaged T cells are capable of serial target cell lysis, and are not affected by immune escape mechanisms interfering with peptide antigen processing and presentation, or clonal T cell differentiation; see, for example, WO 2007/042261.

[0117] Cytotoxicity mediated by FLT3×CD3 bispecific antibody constructs can be measured in various ways. See Examples 10. Effector cells can be e.g. stimulated enriched (human) CD8 positive T cells or unstimulated (human) peripheral blood mononuclear cells (PBMC). If the target cells are of macaque origin or express or are transfected with macaque FLT3, the effector cells should also be of macaque origin such as a macaque T cell line, e.g. 4119LnPx. The target cells should express (at least the extracellular domain of) FLT3, e.g. human or macaque FLT3. Target cells can be a cell line (such as CHO) which is stably or transiently transfected with FLT3, e.g. human or macaque FLT3. Alternatively, the target cells can be a FLT3 positive natural expresser cell line, such as the FLT3 positive human AML cell lines EOL-1, MOLM-13 and MV4-11. Usually EC50 values are expected to be lower with target cell lines expressing higher levels of FLT3 on the cell surface. The effector to target cell (E:T) ratio is usually about 10:1, but can also vary. Cytotoxic activity of FLT3×CD3 bispecific antibody constructs can be measured in a 51-chromium release assay (incubation time of about 18 hours) or in a in a FACS-based cytotoxicity assay (incubation time of about 48 hours). Modifications of the assay incubation time (cytotoxic reaction) are also possible. Other methods of measuring cytotoxicity are well-known to the skilled person and comprise MTT or MTS assays, ATP-based assays including bioluminescent assays, the sulforhodamine B (SRB) assay, WST assay, clonogenic assay and the ECIS technology.

[0118] The cytotoxic activity mediated by FLT3×CD3 bispecific antibody constructs of the present invention is preferably measured in a cell-based cytotoxicity assay. It may also be measured in a 51-chromium release assay. It is represented by the EC₅₀ value, which corresponds to the half maximal effective concentration (concentration of the antibody construct which induces a cytotoxic response halfway between the baseline and maximum). Preferably, the EC₅₀ value of the FLT3×CD3 bispecific antibody constructs is ≦5000 pM or ≦4000 pM, more preferably ≦3000 pM or ≦2000 pM, even more preferably ≦1000 pM or ≦500 pM, even more preferably ≦400 pM or ≦300 pM, even more preferably ≦200 pM, even more preferably ≦100 pM, even more preferably ≦50 pM, even more preferably ≦20 pM or ≦0 pM, and most preferably ≦5 pM.

[0119] The above given EC₅₀ values can be measured in different assays. The skilled person is aware that an EC₅₀ value can be expected to be lower when stimulated/enriched CD8+ T cells are used as effector cells, compared with unstimulated PBMC. It can furthermore be expected that the EC₅₀ values are lower when the target cells express a high number of the target antigen compared with a low target expression rat. For example, when stimulated/enriched human CD8+ T cells are used as effector cells (and either FLT3 transfected cells such as CHO cells or FLT3 positive human AML cell lines EOL-1, MOLM-13 and MV4-11 are used as target cells), the EC₅₀ value of the FLT3×CD3 bispecific antibody construct is preferably ≦1000 pM, more preferably ≦500 pM, even more preferably ≦250 pM, even more preferably ≦100 pM, even more preferably ≦50 pM, even more preferably ≦10 pM, and most preferably ≦5 pM. When human PBMCs are used as effector cells, the EC₅₀ value of the FLT3×CD3 bispecific antibody construct is preferably ≦5000 pM or ≦4000 pM (in particular when the target cells are FLT3 positive human AML cell lines EOL-1, MOLM-13 and MV4-11), more preferably ≦2000 pM (in particular when the target cells are FLT3 transfected cells such as CHO cells), more preferably ≦1000 pM or ≦500 pM, even more preferably ≦200 pM, even more preferably ≦150 pM, even more preferably ≦100 pM, and most preferably ≦50 pM, or lower. When a macaque T cell line such as LnPx4119 is used as effector cells, and a macaque FLT3 transfected cell line such as CHO cells is used as target cell line, the EC₅₀ value of the FLT3×CD3 bispecific antibody construct is preferably ≦2000 pM or ≦500 pM, more preferably ≦1000 pM or ≦500 pM, even more preferably ≦300 pM or ≦250 pM, even more preferably ≦100 pM, and most preferably ≦50 pM.

[0120] Preferably, the FLT3×CD3 bispecific antibody constructs of the present invention do not induce/mediate lysis or do not essentially induce/mediate lysis of FLT3 negative cells such as CHO cells. The term “do not induce lysis”, “do not essentially induce lysis”, “do not mediate lysis” or “do not essentially mediate lysis” means that an antibody construct of the present invention does not induce or mediate lysis of more than 30%, preferably not more than 20%, more preferably not more than 10%, particularly preferably not more than 9%, 8%, 7%, 6% or 5% of FLT3 negative cells, whereby lysis of a FLT3 positive human lung carcinoma cell line SHP-77 (see above) is set to be 100%. This usually applies for concentrations of the antibody construct of up to 500 nM. The skilled person knows how to measure cell lysis without further ado. Moreover, the present specification teaches specific instructions how to measure cell lysis.

[0121] The difference in cytotoxic activity between the monomeric and the dimeric isoform of individual FLT3×CD3 bispecific antibody constructs is referred to as “potency gap”. This potency gap can e.g. be calculated as ratio between EC₅₀ values of the molecule's monomeric and dimeric form, see Example 17. Potency gaps of the FLT3×CD3 bispecific antibody constructs of the present invention are preferably ≦5, more preferably ≦4, even more preferably ≦3, even more preferably ≦2 and most preferably ≦1.

[0122] The first and/or the second (or any further) binding domain(s) of the antibody construct of the invention is/are preferably cross-species specific for members of the mammalian order of primates. Cross-species specific CD3 binding domains are, for example, described in WO2008/119567. According to one embodiment, the first and/or second binding domain, in addition to binding to human FLT3 and human CD3, respectively, will also bind to FLT3/CD3 of primates including (but not limited to) new world primates (such as Callithrix jacchus, Saguinus Oedipus or Saimiri sciureus), old world primates (such baboons and macaques), gibbons, orangutans, and non-human homininae. It is envisaged that the first binding domain of the antibody construct of the invention which binds to human FLT3 on the surface of a target cell also binds at least to macaque FLT3, and/or the second binding domain which binds to human CD3 on the surface of a T cell also binds at least to macaque CD3. A preferred macaque is Macaca fascicularis. Macaca mulatta (Rhesus) is also envisaged.

[0123] In one aspect of the invention, the first binding domain binds to human FLT3 and further binds to macaque FLT3, such as FLT3 of Macaca fascicularis, and more preferably, to macaque FLT3 expressed on the surface macaque cells. A preferred Macaca fascicularis FLT3 is depicted in SEQ ID NO: 802. The affinity of the first binding domain for macaque FLT3 is preferably ≦5 nM, more preferably ≦0 nM, even more preferably ≦5 nM, even more preferably nM, even more preferably ≦0.5 nM, even more preferably ≦0.1 nM, and most preferably ≦0.05 nM or even ≦0.01 nM.

[0124] Preferably the affinity gap of the antibody constructs according to the invention for binding macaque FLT3 versus human FLT3 [ma FLT3:hu FLT3] (as determined e.g. by BiaCore or by Scatchard analysis) is <100, preferably <20, more preferably <15, further preferably <10, even more preferably <8, more preferably <6 and most preferably <2. Preferred ranges for the affinity gap of the antibody constructs according to the invention for binding macaque FLT3 versus human FLT3 are between 0.1 and 20, more preferably between 0.2 and 10, even more preferably between 0.3 and 6, even more preferably between 0.5 and 3 or between 0.5 and 2.5, and most preferably between 0.5 and 2 or between 0.6 and 2. See Examples 5.

[0125] In one embodiment of the antibody construct of the invention, the second binding domain binds to human CD3 epsilon and to Callithrix jacchus, Saguinus Oedipus or Saimiri sciureus CD3 epsilon. Preferably, the second binding domain binds to an extracellular epitope of these CD3 epsilon chains. It is also envisaged that the second binding domain binds to an extracellular epitope of the human and the Macaca CD3 epsilon chain. The most preferred epitope of CD3 epsilon is comprised within amino acid residues 1-27 of the human CD3 epsilon extracellular domain. Even more specifically, the epitope comprises at least the amino acid sequence Gln-Asp-Gly-Asn-Glu. Callithrix jacchus and Saguinus oedipus are both new world primate belonging to the family of Callitrichidae, while Saimiri sciureus is a new world primate belonging to the family of Cebidae.

[0126] It is particularly preferred for the antibody construct of the present invention that the second binding domain which binds to human CD3 on the surface of a T cell comprises a VL region comprising CDR-L1, CDR-L2 and CDR-L3 selected from:
[0127] (a) CDR-L1 as depicted in SEQ ID NO: 27 of WO 2008/119567, CDR-L2 as depicted in SEQ ID NO: 28 of WO 2008/119567 and CDR-L3 as depicted in SEQ ID NO: 29 of WO 2008/119567;
[0128] (b) CDR-L1 as depicted in SEQ ID NO: 117 of WO2008/119567, CDR-L2 as depicted in SEQ ID NO: 118 of WO2008/119567 and CDR-L3 as depicted in SEQ ID NO: 119 of WO 2008/119567; and
[0129] (c) CDR-L1 as depicted in SEQ ID NO: 153 of WO2008/119567, CDR-L2 as depicted in SEQ ID NO: 154 of WO 2008/119567 and CDR-L3 as depicted in SEQ ID NO: 155 of WO 2008/119567.

[0130] In an alternatively preferred embodiment of the antibody construct of the present invention, the second binding domain which binds to human CD3 on the surface of a T cell comprises a VH region comprising CDR-H 1, CDR-H2 and CDR-H3 selected from:
[0131] (a) CDR-H1 as depicted in SEQ ID NO: 12 of WO2008/119567, CDR-H2 as depicted in SEQ ID NO: 13 of WO 2008/119567 and CDR-H3 as depicted in SEQ ID NO: 14 of WO 2008/119567;
[0132] (b) CDR-H1 as depicted in SEQ ID NO: 30 of WO 2008/119567, CDR-H2 as depicted in SEQ ID NO: 31 of WO 2008/119567 and CDR-H3 as depicted in SEQ ID NO: 32 of WO 2008/119567;
[0133] (c) CDR-H1 as depicted in SEQ ID NO: 48 of WO 2008/119567, CDR-H2 as depicted in SEQ ID NO: 49 of WO 2008/119567 and CDR-H3 as depicted in SEQ ID NO: 50 of WO 2008/119567;
[0134] (d) CDR-H1 as depicted in SEQ ID NO: 66 of WO 2008/119567, CDR-H2 as depicted in SEQ ID NO: 67 of WO 2008/119567 and CDR-H3 as depicted in SEQ ID NO: 68 of WO 2008/119567;
[0135] (e) CDR-H1 as depicted in SEQ ID NO: 84 of WO 2008/119567, CDR-H2 as depicted in SEQ ID NO: 85 of WO 2008/119567 and CDR-H3 as depicted in SEQ ID NO: 86 of WO 2008/119567;
[0136] (f) CDR-H1 as depicted in SEQ ID NO: 102 of WO2008/119567, CDR-H2 as depicted in SEQ ID NO: 103 of WO2008/119567 and CDR-H3 as depicted in SEQ ID NO: 104 of WO 2008/119567;
[0137] (g) CDR-H1 as depicted in SEQ ID NO: 120 of WO2008/119567, CDR-H2 as depicted in SEQ ID NO: 121 of WO2008/119567 and CDR-H3 as depicted in SEQ ID NO: 122 of WO 2008/119567;
[0138] (h) CDR-H1 as depicted in SEQ ID NO: 138 of WO2008/119567, CDR-H2 as depicted in SEQ ID NO: 139 of WO2008/119567 and CDR-H3 as depicted in SEQ ID NO: 140 of WO 2008/119567;
[0139] (i) CDR-H1 as depicted in SEQ ID NO: 156 of WO2008/119567, CDR-H2 as depicted in SEQ ID NO: 157 of WO2008/119567 and CDR-H3 as depicted in SEQ ID NO: 158 of WO 2008/119567; and
[0140] (j) CDR-H1 as depicted in SEQ ID NO: 174 of WO2008/119567, CDR-H2 as depicted in SEQ ID NO: 175 of WO2008/119567 and CDR-H3 as depicted in SEQ ID NO: 176 of WO 2008/119567.

[0141] the It is further preferred for the antibody construct of the present invention that the second binding domain which binds to human CD3 on the surface of a T cell comprises a VL region selected from the group consisting of a VL region as depicted in SEQ ID NO: 18, SEQ ID NO: 27, SEQ ID NO: 36, SEQ ID NO: 45, SEQ ID NO: 54, SEQ ID NO: 63, SEQ ID NO: 72, SEQ ID NO: 81, SEQ ID NO: 90, SEQ ID NO: 99, and SEQ ID NO: 102 (see also SEQ ID NO: 35, 39, 125, 129, 161 or 165 of WO 2008/119567).

[0142] It is alternatively preferred that the second binding domain which binds to human CD3 on the surface of a T cell comprises a VH region selected from the group consisting of a VH region as depicted in SEQ ID NO: 17, SEQ ID NO: 26, SEQ ID NO: 35, SEQ ID NO: 44, SEQ ID NO: 53, SEQ ID NO: 62, SEQ ID NO: 71, SEQ ID NO: 80, SEQ ID NO: 89, SEQ ID NO: 98, and SEQ ID NO: 101 (see also SEQ ID NO: 15, 19, 33, 37, 51, 55, 69, 73, 87, 91, 105, 109, 123, 127, 141, 145, 159, 163, 177 or 181 of WO 2008/119567).

[0143] More preferably, the antibody construct of the present invention is characterized by the second binding domain which binds to human CD3 on surface of a T cell comprising a VL region and a VH region selected from the group consisting of:
[0144] (a) a VL region as depicted in SEQ ID NO: 17 or 21 of WO 2008/119567 and a VH region as depicted in SEQ ID NO: 15 or 19 of WO 2008/119567;
[0145] (b) a VL region as depicted in SEQ ID NO: 35 or 39 of WO 2008/119567 and a VH region as depicted in SEQ ID NO: 33 or 37 of WO 2008/119567;
[0146] (c) a VL region as depicted in SEQ ID NO: 53 or 57 of WO 2008/119567 and a VH region as depicted in SEQ ID NO: 51 or 55 of WO 2008/119567;
[0147] (d) a VL region as depicted in SEQ ID NO: 71 or 75 of WO 2008/119567 and a VH region as depicted in SEQ ID NO: 69 or 73 of WO 2008/119567;
[0148] (e) a VL region as depicted in SEQ ID NO: 89 or 93 of WO 2008/119567 and a VH region as depicted in SEQ ID NO: 87 or 91 of WO 2008/119567;
[0149] (f) a VL region as depicted in SEQ ID NO: 107 or 111 of WO 2008/119567 and a VH region as depicted in SEQ ID NO: 105 or 109 of WO 2008/119567;
[0150] (g) a VL region as depicted in SEQ ID NO: 125 or 129 of WO 2008/119567 and a VH region as depicted in SEQ ID NO: 123 or 127 of WO 2008/119567;
[0151] (h) a VL region as depicted in SEQ ID NO: 143 or 147 of WO 2008/119567 and a VH region as depicted in SEQ ID NO: 141 or 145 of WO 2008/119567;
[0152] (i) a VL region as depicted in SEQ ID NO: 161 or 165 of WO 2008/119567 and a VH region as depicted in SEQ ID NO: 159 or 163 of WO 2008/119567; and
[0153] (j) a VL region as depicted in SEQ ID NO: 179 or 183 of WO 2008/119567 and a VH region as depicted in SEQ ID NO: 177 or 181 of WO 2008/119567.

[0154] Also preferred in connection with the antibody construct of the present invention is a second binding domain which binds to human CD3 on the surface of a T cell comprising a VL region as depicted in SEQ ID NO: 102 and a VH region as depicted in SEQ ID NO: 101.

[0155] According to a preferred embodiment of the antibody construct of the present invention, the binding domains and in particular the second binding domain (which binds to human CD3 on the surface of a T cell) have the following format: The pairs of VH regions and VL regions are in the format of a single chain antibody (scFv). The VH and VL regions are arranged in the order VH-VL or VL-VH. It is preferred that the VH-region is positioned N-terminally of a linker sequence, and the VL-region is positioned C-terminally of the linker sequence.

[0156] A preferred embodiment of the above described antibody construct of the present invention is characterized by the second binding domain which binds to human CD3 on the surface of a T cell comprising an amino acid sequence selected from the group consisting of SEQ ID NO: 19, SEQ ID NO: 28, SEQ ID NO: 37, SEQ ID NO: 46, SEQ ID NO: 55, SEQ ID NO: 64, SEQ ID NO: 73, SEQ ID NO: 82, SEQ ID NO: 91, SEQ ID NO: 100, and SEQ ID NO: 103 (see also SEQ ID NOs: 23, 25, 41, 43, 59, 61, 77, 79, 95, 97, 113, 115, 131, 133, 149, 151, 167, 169, 185 or 187 of WO 2008/119567).

[0157] It is also envisaged that the antibody construct of the invention has, in addition to its function to bind to the target molecules FLT3 and CD3, a further function. In this format, the antibody construct is a trifunctional or multifunctional antibody construct by targeting target cells through binding to FLT3, mediating cytotoxic T cell activity through CD3 binding and providing a further function such as a fully functional Fc constant domain mediating antibody-dependent cellular cytotoxicity through recruitment of effector cells like NK cells, a label (fluorescent etc.), a therapeutic agent such as a toxin or radionuclide, and/or means to enhance serum half-life, etc.

[0158] Examples for means to extend serum half-life of the antibody constructs of the invention include peptides, proteins or domains of proteins, which are fused or otherwise attached to the antibody constructs. The group of peptides, proteins or protein domains includes peptides binding to other proteins with preferred pharmacokinetic profile in the human body such as serum albumin (see WO 2009/127691). An alternative concept of such half-life extending peptides includes peptides binding to the neonatal Fc receptor (FcRn, see WO 2007/098420), which can also be used in the constructs of the present invention. The concept of attaching larger domains of proteins or complete proteins includes e.g. the fusion of human serum albumin, variants or mutants of human serum albumin (see WO 2011/051489, WO 2012/059486, WO 2012/150319, WO 2013/135896, WO 2014/072481, WO 2013/075066) or domains thereof as well as the fusion of constant region of immunoglobulins (Fc domains) and variants thereof. Such variants of Fc domains may be optimized/modified in order to allow the desired pairing of dimers or mulimers, to abolish Fc receptor binding (e.g. the Fcγ receptor) or for other reasons. A further concept known in the art to extend the half-life of small protein compounds in the human body is the pegylation of those compounds such as the antibody construct of the present invention.

[0159] In a preferred embodiment, the antibody construct of the invention is described as follows:
[0160] (a) a polypeptide comprising in the following order starting from the N-terminus:
   [0161] a polypeptide having an amino acid sequence selected from the group consisting of SEQ ID NO: 159, SEQ ID NO: 169, SEQ ID NO: 179, SEQ ID NO: 189, SEQ ID NO: 199, SEQ ID NO: 209, SEQ ID NO: 219, and SEQ ID NO: 229, SEQ ID NO: 239, SEQ ID NO: 249, and SEQ ID NO: 259, SEQ ID NO: 269, SEQ ID NO: 279, and SEQ ID NO: 289, SEQ ID NO: 299, SEQ ID NO: 309, SEQ ID NO: 319, and SEQ ID NO: 329, SEQ ID NO: 339, SEQ ID NO: 349, and SEQ ID NO: 359, SEQ ID NO: 369, SEQ ID NO: 379, and SEQ ID NO: 389, SEQ ID NO: 399, SEQ ID NO: 409, SEQ ID NO: 419, and SEQ ID NO: 429, SEQ ID NO: 439, SEQ ID NO: 449, and SEQ ID NO: 459, SEQ ID NO: 469, SEQ ID NO: 479, and SEQ ID NO: 489, SEQ ID NO: 499, SEQ ID NO: 509, SEQ ID NO: 519, and SEQ ID NO: 529, SEQ ID NO: 539, SEQ ID NO: 549, and SEQ ID NO: 559, SEQ ID NO: 569, SEQ ID NO: 579, and SEQ ID NO: 589, SEQ ID NO: 599, SEQ ID NO: 609, SEQ ID NO: 619, and SEQ ID NO: 629, SEQ ID NO: 639, SEQ ID NO: 649, and SEQ ID NO: 659, SEQ ID NO: 669, SEQ ID NO: 679, and SEQ ID NO: 689, SEQ ID NO: 699, SEQ ID NO: 709, SEQ ID NO: 719, and SEQ ID NO: 729, SEQ ID NO: 739, SEQ ID NO: 749, and SEQ ID NO: 759, SEQ ID NO: 769, SEQ ID NO: 779, and SEQ ID NO: 789, and SEQ ID NO: 799;
   [0162] a peptide linker having an amino acid sequence selected from the group consisting of SEQ ID NOs: 1-9; and
   [0163] a polypeptide having an amino acid sequence selected from the group consisting of SEQ ID NO: 19, SEQ ID NO: 28, SEQ ID NO: 37, SEQ ID NO: 46, SEQ ID NO: 55, SEQ ID NO: 64, SEQ ID NO: 73, SEQ ID NO: 82, SEQ ID NO: 91, SEQ ID NO: 100, and SEQ ID NO: 103; and
   [0164] optionally a His-tag, such as the one depicted in SEQ ID NO 10;
[0165] (b) a polypeptide comprising in following order starting from the N-terminus:
   [0166] a polypeptide having an amino acid sequence selected from the group consisting of SEQ ID NO: 159, SEQ ID NO: 169, SEQ ID NO: 179, SEQ ID NO: 189, SEQ ID NO: 199, SEQ ID NO: 209, SEQ ID NO: 219, and SEQ ID NO: 229, SEQ ID NO: 239, SEQ ID NO: 249, and SEQ ID NO: 259, SEQ ID NO: 269, SEQ ID NO: 279, and SEQ ID NO: 289, SEQ ID NO: 299, SEQ ID NO: 309, SEQ ID NO: 319, and SEQ ID NO: 329, SEQ ID NO: 339, SEQ ID NO: 349, and SEQ ID NO: 359, SEQ ID NO: 369, SEQ ID NO: 379, and SEQ ID NO: 389, SEQ ID NO: 399, SEQ ID NO: 409, SEQ ID NO: 419, and SEQ ID NO: 429, SEQ ID NO: 439, SEQ ID NO: 449, and SEQ ID NO: 459, SEQ ID NO: 469, SEQ ID NO: 479, and SEQ ID NO: 489, SEQ ID NO: 499, SEQ ID NO: 509, SEQ ID NO: 519, and SEQ ID NO: 529, SEQ ID NO: 539, SEQ ID NO: 549, and SEQ ID NO: 559, SEQ ID NO: 569, SEQ ID NO: 579, and SEQ ID NO: 589, SEQ ID NO: 599, SEQ ID NO: 609, SEQ ID NO: 619, and SEQ ID NO: 629, SEQ ID NO: 639, SEQ ID NO: 649, and SEQ ID NO: 659, SEQ ID NO: 669, SEQ ID NO: 679, and SEQ ID NO: 689, SEQ ID NO: 699, SEQ ID NO: 709, SEQ ID NO: 719, and SEQ ID NO: 729, SEQ ID NO: 739, SEQ ID NO: 749, and SEQ ID NO: 759, SEQ ID NO: 769, SEQ ID NO: 779, and SEQ ID NO: 789, and SEQ ID NO: 799;
   [0167] a peptide linker having an amino acid sequence selected from the group consisting of SEQ ID NOs: 1-9;
   [0168] a polypeptide having an amino acid sequence selected from the group consisting of SEQ ID NO: 19, SEQ ID NO: 28, SEQ ID NO: 37, SEQ ID NO: 46, SEQ ID NO: 55, SEQ ID NO: 64, SEQ ID NO: 73, SEQ ID NO: 82, SEQ ID NO: 91, SEQ ID NO: 100, and SEQ ID NO: 103;
   [0169] optionally a peptide linker having an amino acid sequence selected from the group consisting of SEQ ID NOs: 1-9;
   [0170] a polypeptide having an amino acid sequence selected from the group consisting of SEQ ID NOs: 104-134; and
   [0171] optionally a His-tag, such as the one depicted in SEQ ID NO 10;
[0172] (c) a polypeptide comprising in the following order starting from the N-terminus:
   [0173] a polypeptide having the amino acid sequence QRFVTGHFGGLX₁PANG (SEQ ID NO: 135) whereas X₁ is Y or H; and
   [0174] a polypeptide having an amino acid sequence selected from the group consisting of SEQ ID NO: 159, SEQ ID NO: 169, SEQ ID NO: 179, SEQ ID NO: 189, SEQ ID NO: 199, SEQ ID NO: 209, SEQ ID NO: 219, and SEQ ID NO: 229, SEQ ID NO: 239, SEQ ID NO: 249, and SEQ ID NO: 259, SEQ ID NO: 269, SEQ ID NO: 279, and SEQ ID NO: 289, SEQ ID NO: 299, SEQ ID NO: 309, SEQ ID NO: 319, and SEQ ID NO: 329, SEQ ID NO: 339, SEQ ID NO: 349, and SEQ ID NO: 359, SEQ ID NO: 369, SEQ ID NO: 379, and SEQ ID NO: 389, SEQ ID NO: 399, SEQ ID NO: 409, SEQ ID NO: 419, and SEQ ID NO: 429, SEQ ID NO: 439, SEQ ID NO: 449, and SEQ ID NO: 459, SEQ ID NO: 469, SEQ ID NO: 479, and SEQ ID NO: 489, SEQ ID NO: 499, SEQ ID NO: 509, SEQ ID NO: 519, and SEQ ID NO: 529, SEQ ID NO: 539, SEQ ID NO: 549, and SEQ ID NO: 559, SEQ ID NO: 569, SEQ ID NO: 579, and SEQ ID NO: 589, SEQ ID NO: 599, SEQ ID NO: 609, SEQ ID NO: 619, and SEQ ID NO: 629, SEQ ID NO: 639, SEQ ID NO: 649, and SEQ ID NO: 659, SEQ ID NO: 669, SEQ ID NO: 679, and SEQ ID NO: 689, SEQ ID NO: 699, SEQ ID NO: 709, SEQ ID NO: 719, and SEQ ID NO: 729, SEQ ID NO: 739, SEQ ID NO: 749, and SEQ ID NO: 759, SEQ ID NO: 769, SEQ ID NO: 779, and SEQ ID NO: 789, and SEQ ID NO: 799;
   [0175] a peptide linker having an amino acid sequence selected from the group consisting of SEQ ID NOs: 1-9;
   [0176] a polypeptide having an amino acid sequence selected from the group consisting of SEQ ID NO: 19, SEQ ID NO: 28, SEQ ID NO: 37, SEQ ID NO: 46, SEQ ID NO: 55, SEQ ID NO: 64, SEQ ID NO: 73, SEQ ID NO: 82, SEQ ID NO: 91, SEQ ID NO: 100, and SEQ ID NO: 103;
   [0177] a polypeptide having the amino acid sequence QRFVTGHFGGLHPANG (SEQ ID NO: 137) or QRFCTGHFGGLHPCNG (SEQ ID NO: 139); and
   [0178] optionally a His-tag, such as the one depicted in SEQ ID NO 10;
[0179] (d) a polypeptide comprising in the following order starting from the N-terminus
   [0180] a polypeptide having an amino acid sequence selected from the group consisting of SEQ ID NO: 17, SEQ ID NO: 26, SEQ ID NO: 35, SEQ ID NO: 44, SEQ ID NO: 53, SEQ ID NO: 62, SEQ ID NO: 71, SEQ ID NO: 80, SEQ ID NO: 89, SEQ ID NO: 98, and SEQ ID NO: 101;
   [0181] a peptide linker having the amino acid sequence depicted in SEQ ID NO: 8;
   [0182] a polypeptide having an amino acid sequence selected from the group consisting of SEQ ID NO: 158, SEQ ID NO: 168, SEQ ID NO: 178, SEQ ID NO: 188, SEQ ID NO: 198, SEQ ID NO: 208, SEQ ID NO: 218, SEQ ID NO: 228, SEQ ID NO: 238, SEQ ID NO: 248, SEQ ID NO: 258, SEQ ID NO: 268, SEQ ID NO: 278, SEQ ID NO: 288, SEQ ID NO: 298, SEQ ID NO: 308, SEQ ID NO: 318, SEQ ID NO: 328, SEQ ID NO: 338, SEQ ID NO: 348, SEQ ID NO: 358, SEQ ID NO: 368, SEQ ID NO: 378, SEQ ID NO: 388, SEQ ID NO: 398, SEQ ID NO: 408, SEQ ID NO: 418, SEQ ID NO: 428, SEQ ID NO: 438, SEQ ID NO: 448, SEQ ID NO: 458, SEQ ID NO: 468, SEQ ID NO: 478, SEQ ID NO: 488, SEQ ID NO: 498, SEQ ID NO: 508, SEQ ID NO: 518, SEQ ID NO: 528, SEQ ID NO: 538, SEQ ID NO: 548, SEQ ID NO: 558, SEQ ID NO: 568, SEQ ID NO: 578, SEQ ID NO: 588, SEQ ID NO: 598, SEQ ID NO: 608, SEQ ID NO: 618, SEQ ID NO: 628, SEQ ID NO: 638, SEQ ID NO: 648, SEQ ID NO: 658, SEQ ID NO: 668, SEQ ID NO: 678, SEQ ID NO: 688, SEQ ID NO: 698, SEQ ID NO: 708, SEQ ID NO: 718, SEQ ID NO: 728, SEQ ID NO: 738, SEQ ID NO: 748, SEQ ID NO: 758, SEQ ID NO: 768, SEQ ID NO: 778, SEQ ID NO: 788, and SEQ ID NO: 798 and a serine residue at the C-terminus;
   [0183] a polypeptide having the amino acid sequence depicted in SEQ ID NO: 140; and
   [0184] a polypeptide comprising in the following order starting from the N-terminus:
   [0185] a polypeptide having an amino acid sequence selected from the group consisting of SEQ ID NO: 157, SEQ ID NO: 167, SEQ ID NO: 177, SEQ ID NO: 187, SEQ ID NO: 197, SEQ ID NO: 207, SEQ ID NO: 217, SEQ ID NO: 227, SEQ ID NO: 237, SEQ ID NO: 247, SEQ ID NO: 257, SEQ ID NO: 267, SEQ ID NO: 277, SEQ ID NO: 287, SEQ ID NO: 297, SEQ ID NO: 307, SEQ ID NO: 317, SEQ ID NO: 327, SEQ ID NO: 337, SEQ ID NO: 347, SEQ ID NO: 357, SEQ ID NO: 367, SEQ ID NO: 377, SEQ ID NO: 387, SEQ ID NO: 397, SEQ ID NO: 407, SEQ ID NO: 417, SEQ ID NO: 427, SEQ ID NO: 437, SEQ ID NO: 447, SEQ ID NO: 457, SEQ ID NO: 467, SEQ ID NO: 477, SEQ ID NO: 487, SEQ ID NO: 497, SEQ ID NO: 507, SEQ ID NO: 517, SEQ ID NO: 527, SEQ ID NO: 537, SEQ ID NO: 547, SEQ ID NO: 557, SEQ ID NO: 567, SEQ ID NO: 577, SEQ ID NO: 587, SEQ ID NO: 597, SEQ ID NO: 607, SEQ ID NO: 617, SEQ ID NO: 627, SEQ ID NO: 637, SEQ ID NO: 647, SEQ ID NO: 657, SEQ ID NO: 667, SEQ ID NO: 677, SEQ ID NO: 687, SEQ ID NO: 697, SEQ ID NO: 707, SEQ ID NO: 717, SEQ ID NO: 727, SEQ ID NO: 737, SEQ ID NO: 747, SEQ ID NO: 757, SEQ ID NO: 767, SEQ ID NO: 777, SEQ ID NO: 787, and SEQ ID NO: 797;
   [0186] a peptide linker having the amino acid sequence depicted in SEQ ID NO: 8;
   [0187] a polypeptide having an amino acid sequence selected from the group consisting of SEQ ID NO: 18, SEQ ID NO: 27, SEQ ID NO: 36, SEQ ID NO: 45, SEQ ID NO: 54, SEQ ID NO: 63, SEQ ID NO: 72, SEQ ID NO: 81, SEQ ID NO: 90, SEQ ID NO: 99, and SEQ ID NO: 102 and a serine residue at the C-terminus;
   [0188] a polypeptide having the amino acid sequence depicted in SEQ ID NO: 141;
[0189] (e) a polypeptide comprising in the following order starting from the N-terminus:
   [0190] a polypeptide having an amino acid sequence selected from the group consisting of SEQ ID NO: 17, SEQ ID NO: 26, SEQ ID NO: 35, SEQ ID NO: 44, SEQ ID NO: 53, SEQ ID NO: 62, SEQ ID NO: 71, SEQ ID NO: 80, SEQ ID NO: 89, SEQ ID NO: 98, and SEQ ID NO: 101;
   [0191] a peptide linker having the amino acid sequence depicted in SEQ ID NO: 8;
   [0192] a polypeptide having an amino acid sequence selected from the group consisting of SEQ ID NO: 158, SEQ ID NO: 168, SEQ ID NO: 178, SEQ ID NO: 188, SEQ ID NO: 198, SEQ ID NO: 208, SEQ ID NO: 218, SEQ ID NO: 228, SEQ ID NO: 238, SEQ ID NO: 248, SEQ ID NO: 258, SEQ ID NO: 268, SEQ ID NO: 278, SEQ ID NO: 288, SEQ ID NO: 298, SEQ ID NO: 308, SEQ ID NO: 318, SEQ ID NO: 328, SEQ ID NO: 338, SEQ ID NO: 348, SEQ ID NO: 358, SEQ ID NO: 368, SEQ ID NO: 378, SEQ ID NO: 388, SEQ ID NO: 398, SEQ ID NO: 408, SEQ ID NO: 418, SEQ ID NO: 428, SEQ ID NO: 438, SEQ ID NO: 448, SEQ ID NO: 458, SEQ ID NO: 468, SEQ ID NO: 478, SEQ ID NO: 488, SEQ ID NO: 498, SEQ ID NO: 508, SEQ ID NO: 518, SEQ ID NO: 528, SEQ ID NO: 538, SEQ ID NO: 548, SEQ ID NO: 558, SEQ ID NO: 568, SEQ ID NO: 578, SEQ ID NO: 588, SEQ ID NO: 598, SEQ ID NO: 608, SEQ ID NO: 618, SEQ ID NO: 628, SEQ ID NO: 638, SEQ ID NO: 648, SEQ ID NO: 658, SEQ ID NO: 668, SEQ ID NO: 678, SEQ ID NO: 688, SEQ ID NO: 698, SEQ ID NO: 708, SEQ ID NO: 718, SEQ ID NO: 728, SEQ ID NO: 738, SEQ ID NO: 748, SEQ ID NO: 758, SEQ ID NO: 768, SEQ ID NO: 778, SEQ ID NO: 788, and SEQ ID NO: 798;
   [0193] a polypeptide having the amino acid sequence depicted in SEQ ID NO: 142; and
   [0194] a polypeptide comprising in the following order starting from the N-terminus:
   [0195] a polypeptide having an amino acid sequence selected from the group consisting of SEQ SEQ ID NO: 157, SEQ ID NO: 167, SEQ ID NO: 177, SEQ ID NO: 187, SEQ ID NO: 197, SEQ ID NO: 207, SEQ ID NO: 217, SEQ ID NO: 227, SEQ ID NO: 237, SEQ ID NO: 247, SEQ ID NO: 257, SEQ ID NO: 267, SEQ ID NO: 277, SEQ ID NO: 287, SEQ ID NO: 297, SEQ ID NO: 307, SEQ ID NO: 317, SEQ ID NO: 327, SEQ ID NO: 337, SEQ ID NO: 347, SEQ ID NO: 357, SEQ ID NO: 367, SEQ ID NO: 377, SEQ ID NO: 387, SEQ ID NO: 397, SEQ ID NO: 407, SEQ ID NO: 417, SEQ ID NO: 427, SEQ ID NO: 437, SEQ ID NO: 447, SEQ ID NO: 457, SEQ ID NO: 467, SEQ ID NO: 477, SEQ ID NO: 487, SEQ ID NO: 497, SEQ ID NO: 507, SEQ ID NO: 517, SEQ ID NO: 527, SEQ ID NO: 537, SEQ ID NO: 547, SEQ ID NO: 557, SEQ ID NO: 567, SEQ ID NO: 577, SEQ ID NO: 587, SEQ ID NO: 597, SEQ ID NO: 607, SEQ ID NO: 617, SEQ ID NO: 627, SEQ ID NO: 637, SEQ ID NO: 647, SEQ ID NO: 657, SEQ ID NO: 667, SEQ ID NO: 677, SEQ ID NO: 687, SEQ ID NO: 697, SEQ ID NO: 707, SEQ ID NO: 717, SEQ ID NO: 727, SEQ ID NO: 737, SEQ ID NO: 747, SEQ ID NO: 757, SEQ ID NO: 767, SEQ ID NO: 777, SEQ ID NO: 787, and SEQ ID NO: 797;
   [0196] a peptide linker having an amino acid sequence depicted in SEQ ID NO: 8;
   [0197] a polypeptide having an amino acid sequence selected from the group consisting of SEQ ID NO: 18, SEQ ID NO: 27, SEQ ID NO: 36, SEQ ID NO: 45, SEQ ID NO: 54, SEQ ID NO: 63, SEQ ID NO: 72, SEQ ID NO: 81, SEQ ID NO: 90, SEQ ID NO: 99, and SEQ ID NO: 102 and a serine residue at the C-terminus; [CD3 VL]
   [0198] a polypeptide having the amino acid sequence depicted in SEQ ID NO: 143;
[0199] (f) [V5 Hetero-Fc] a polypeptide comprising in the following order starting from the N-terminus:
   [0200] a polypeptide having an amino acid sequence selected from the group consisting of SEQ ID NO: 159, SEQ ID NO: 169, SEQ ID NO: 179, SEQ ID NO: 189, SEQ ID NO: 199, SEQ ID NO: 209, SEQ ID NO: 219, and SEQ ID NO: 229, SEQ ID NO: 239, SEQ ID NO: 249, and SEQ ID NO: 259, SEQ ID NO: 269, SEQ ID NO: 279, and SEQ ID NO: 289, SEQ ID NO: 299, SEQ ID NO: 309, SEQ ID NO: 319, and SEQ ID NO: 329, SEQ ID NO: 339, SEQ ID NO: 349, and SEQ ID NO: 359, SEQ ID NO: 369, SEQ ID NO: 379, and SEQ ID NO: 389, SEQ ID NO: 399, SEQ ID NO: 409, SEQ ID NO: 419, and SEQ ID NO: 429, SEQ ID NO: 439, SEQ ID NO: 449, and SEQ ID NO: 459, SEQ ID NO: 469, SEQ ID NO: 479, and SEQ ID NO: 489, SEQ ID NO: 499, SEQ ID NO: 509, SEQ ID NO: 519, and SEQ ID NO: 529, SEQ ID NO: 539, SEQ ID NO: 549, and SEQ ID NO: 559, SEQ ID NO: 569, SEQ ID NO: 579, and SEQ ID NO: 589, SEQ ID NO: 599, SEQ ID NO: 609, SEQ ID NO: 619, and SEQ ID NO: 629, SEQ ID NO: 639, SEQ ID NO: 649, and SEQ ID NO: 659, SEQ ID NO: 669, SEQ ID NO: 679, and SEQ ID NO: 689, SEQ ID NO: 699, SEQ ID NO: 709, SEQ ID NO: 719, and SEQ ID NO: 729, SEQ ID NO: 739, SEQ ID NO: 749, and SEQ ID NO: 759, SEQ ID NO: 769, SEQ ID NO: 779, and SEQ ID NO: 789, and SEQ ID NO: 799;
   [0201] a peptide linker having an amino acid sequence selected from the group consisting of SEQ ID NOs: 1-9; and
   [0202] a polypeptide having an amino acid sequence selected from the group consisting of SEQ ID NO: 19, SEQ ID NO: 28, SEQ ID NO: 37, SEQ ID NO: 46, SEQ ID NO: 55, SEQ ID NO: 64, SEQ ID NO: 73, SEQ ID NO: 82, SEQ ID NO: 91, SEQ ID NO: 100, and SEQ ID NO: 103; and
   [0203] a polypeptide having the amino acid sequence depicted in SEQ ID NO: 144; and
   [0204] a polypeptide having the amino acid sequence depicted in SEQ ID NO: 145;
[0205] (g) a polypeptide comprising in the following order starting from the N-terminus:
   [0206] a polypeptide having an amino acid sequence selected from the group consisting of SEQ ID NO: 159, SEQ ID NO: 169, SEQ ID NO: 179, SEQ ID NO: 189, SEQ ID NO: 199, SEQ ID NO: 209, SEQ ID NO: 219, and SEQ ID NO: 229, SEQ ID NO: 239, SEQ ID NO: 249, and SEQ ID NO: 259, SEQ ID NO: 269, SEQ ID NO: 279, and SEQ ID NO: 289, SEQ ID NO: 299, SEQ ID NO: 309, SEQ ID NO: 319, and SEQ ID NO: 329, SEQ ID NO: 339, SEQ ID NO: 349, and SEQ ID NO: 359, SEQ ID NO: 369, SEQ ID NO: 379, and SEQ ID NO: 389, SEQ ID NO: 399, SEQ ID NO: 409, SEQ ID NO: 419, and SEQ ID NO: 429, SEQ ID NO: 439, SEQ ID NO: 449, and SEQ ID NO: 459, SEQ ID NO: 469, SEQ ID NO: 479, and SEQ ID NO: 489, SEQ ID NO: 499, SEQ ID NO: 509, SEQ ID NO: 519, and SEQ ID NO: 529, SEQ ID NO: 539, SEQ ID NO: 549, and SEQ ID NO: 559, SEQ ID NO: 569, SEQ ID NO: 579, and SEQ ID NO: 589, SEQ ID NO: 599, SEQ ID NO: 609, SEQ ID NO: 619, and SEQ ID NO: 629, SEQ ID NO: 639, SEQ ID NO: 649, and SEQ ID NO: 659, SEQ ID NO: 669, SEQ ID NO: 679, and SEQ ID NO: 689, SEQ ID NO: 699, SEQ ID NO: 709, SEQ ID NO: 719, and SEQ ID NO: 729, SEQ ID NO: 739, SEQ ID NO: 749, and SEQ ID NO: 759, SEQ ID NO: 769, SEQ ID NO: 779, and SEQ ID NO: 789, and SEQ ID NO: 799; and
   [0207] a polypeptide having the amino acid sequence depicted in SEQ ID NO: 146; and
   [0208] a polypeptide comprising in the following order starting from the N-terminus:
   [0209] a polypeptide having an amino acid sequence selected from the group consisting of SEQ ID NO: 19, SEQ ID NO: 28, SEQ ID NO: 37, SEQ ID NO: 46, SEQ ID NO: 55, SEQ ID NO: 64, SEQ ID NO: 73, SEQ ID NO: 82, SEQ ID NO: 91, SEQ ID NO: 100, and SEQ ID NO: 103; and
   [0210] a polypeptide having the amino acid sequence depicted in SEQ ID NO: 147;
[0211] (h) a polypeptide comprising in the following order starting from the N-terminus:
   [0212] a polypeptide having an amino acid sequence selected from the group consisting of SEQ ID NO: 159, SEQ ID NO: 169, SEQ ID NO: 179, SEQ ID NO: 189, SEQ ID NO: 199, SEQ ID NO: 209, SEQ ID NO: 219, and SEQ ID NO: 229, SEQ ID NO: 239, SEQ ID NO: 249, and SEQ ID NO: 259, SEQ ID NO: 269, SEQ ID NO: 279, and SEQ ID NO: 289, SEQ ID NO: 299, SEQ ID NO: 309, SEQ ID NO: 319, and SEQ ID NO: 329, SEQ ID NO: 339, SEQ ID NO: 349, and SEQ ID NO: 359, SEQ ID NO: 369, SEQ ID NO: 379, and SEQ ID NO: 389, SEQ ID NO: 399, SEQ ID NO: 409, SEQ ID NO: 419, and SEQ ID NO: 429, SEQ ID NO: 439, SEQ ID NO: 449, and SEQ ID NO: 459, SEQ ID NO: 469, SEQ ID NO: 479, and SEQ ID NO: 489, SEQ ID NO: 499, SEQ ID NO: 509, SEQ ID NO: 519, and SEQ ID NO: 529, SEQ ID NO: 539, SEQ ID NO: 549, and SEQ ID NO: 559, SEQ ID NO: 569, SEQ ID NO: 579, and SEQ ID NO: 589, SEQ ID NO: 599, SEQ ID NO: 609, SEQ ID NO: 619, and SEQ ID NO: 629, SEQ ID NO: 639, SEQ ID NO: 649, and SEQ ID NO: 659, SEQ ID NO: 669, SEQ ID NO: 679, and SEQ ID NO: 689, SEQ ID NO: 699, SEQ ID NO: 709, SEQ ID NO: 719, and SEQ ID NO: 729, SEQ ID NO: 739, SEQ ID NO: 749, and SEQ ID NO: 759, SEQ ID NO: 769, SEQ ID NO: 779, and SEQ ID NO: 789, and SEQ ID NO: 799; and
   [0213] a polypeptide having the amino acid sequence depicted in SEQ ID NO: 148; and
   [0214] a polypeptide comprising in the following order starting from the N-terminus:
   [0215] a polypeptide having an amino acid sequence selected from the group consisting of SEQ ID NO: 19, SEQ ID NO: 28, SEQ ID NO: 37, SEQ ID NO: 46, SEQ ID NO: 55, SEQ ID NO: 64, SEQ ID NO: 73, SEQ ID NO: 82, SEQ ID NO: 91, SEQ ID NO: 100, and SEQ ID NO: 103; and
   [0216] a polypeptide having the amino acid sequence depicted in SEQ ID NO: 149; or
[0217] (i) a polypeptide comprising in the following order starting from the N-terminus:
   [0218] a polypeptide having an amino acid sequence selected from the group consisting of SEQ ID NO: 159, SEQ ID NO: 169, SEQ ID NO: 179, SEQ ID NO: 189, SEQ ID NO: 199, SEQ ID NO: 209, SEQ ID NO: 219, and SEQ ID NO: 229, SEQ ID NO: 239, SEQ ID NO: 249, and SEQ ID NO: 259, SEQ ID NO: 269, SEQ ID NO: 279, and SEQ ID NO: 289, SEQ ID NO: 299, SEQ ID NO: 309, SEQ ID NO: 319, and SEQ ID NO: 329, SEQ ID NO: 339, SEQ ID NO: 349, and SEQ ID NO: 359, SEQ ID NO: 369, SEQ ID NO: 379, and SEQ ID NO: 389, SEQ ID NO: 399, SEQ ID NO: 409, SEQ ID NO: 419, and SEQ ID NO: 429, SEQ ID NO: 439, SEQ ID NO: 449, and SEQ ID NO: 459, SEQ ID NO: 469, SEQ ID NO: 479, and SEQ ID NO: 489, SEQ ID NO: 499, SEQ ID NO: 509, SEQ ID NO: 519, and SEQ ID NO: 529, SEQ ID NO: 539, SEQ ID NO: 549, and SEQ ID NO: 559, SEQ ID NO: 569, SEQ ID NO: 579, and SEQ ID NO: 589, SEQ ID NO: 599, SEQ ID NO: 609, SEQ ID NO: 619, and SEQ ID NO: 629, SEQ ID NO: 639, SEQ ID NO: 649, and SEQ ID NO: 659, SEQ ID NO: 669, SEQ ID NO: 679, and SEQ ID NO: 689, SEQ ID NO: 699, SEQ ID NO: 709, SEQ ID NO: 719, and SEQ ID NO: 729, SEQ ID NO: 739, SEQ ID NO: 749, and SEQ ID NO: 759, SEQ ID NO: 769, SEQ ID NO: 779, and SEQ ID NO: 789, and SEQ ID NO: 799;
   [0219] a peptide linker having an amino acid sequence selected from the group consisting of SEQ ID NOs: 1-9; and
   [0220] a polypeptide having an amino acid sequence selected from the group consisting of SEQ ID NO: 19, SEQ ID NO: 28, SEQ ID NO: 37, SEQ ID NO: 46, SEQ ID NO: 55, SEQ ID NO: 64, SEQ ID NO: 73, SEQ ID NO: 82, SEQ ID NO: 91, SEQ ID NO: 100, and SEQ ID NO: 103; and
   [0221] a polypeptide having the amino acid sequence depicted in SEQ ID NO: 150.
[0222] (j) a polypeptide comprising in the following order starting from the N-terminus:
   [0223] a polypeptide having an amino acid sequence selected from the group consisting of SEQ ID NO: 159, SEQ ID NO: 169, SEQ ID NO: 179, SEQ ID NO: 189, SEQ ID NO: 199, SEQ ID NO: 209, SEQ ID NO: 219, and SEQ ID NO: 229, SEQ ID NO: 239, SEQ ID NO: 249, and SEQ ID NO: 259, SEQ ID NO: 269, SEQ ID NO: 279, and SEQ ID NO: 289, SEQ ID NO: 299, SEQ ID NO: 309, SEQ ID NO: 319, and SEQ ID NO: 329, SEQ ID NO: 339, SEQ ID NO: 349, and SEQ ID NO: 359, SEQ ID NO: 369, SEQ ID NO: 379, and SEQ ID NO: 389, SEQ ID NO: 399, SEQ ID NO: 409, SEQ ID NO: 419, and SEQ ID NO: 429, SEQ ID NO: 439, SEQ ID NO: 449, and SEQ ID NO: 459, SEQ ID NO: 469, SEQ ID NO: 479, and SEQ ID NO: 489, SEQ ID NO: 499, SEQ ID NO: 509, SEQ ID NO: 519, and SEQ ID NO: 529, SEQ ID NO: 539, SEQ ID NO: 549, and SEQ ID NO: 559, SEQ ID NO: 569, SEQ ID NO: 579, and SEQ ID NO: 589, SEQ ID NO: 599, SEQ ID NO: 609, SEQ ID NO: 619, and SEQ ID NO: 629, SEQ ID NO: 639, SEQ ID NO: 649, and SEQ ID NO: 659, SEQ ID NO: 669, SEQ ID NO: 679, and SEQ ID NO: 689, SEQ ID NO: 699, SEQ ID NO: 709, SEQ ID NO: 719, and SEQ ID NO: 729, SEQ ID NO: 739, SEQ ID NO: 749, and SEQ ID NO: 759, SEQ ID NO: 769, SEQ ID NO: 779, and SEQ ID NO: 789, and SEQ ID NO: 799;
   [0224] a peptide linker having an amino acid sequence selected from the group consisting of SEQ ID NOs: 1-9; and
   [0225] a polypeptide having an amino acid sequence selected from the group consisting of SEQ ID NO: 19, SEQ ID NO: 28, SEQ ID NO: 37, SEQ ID NO: 46, SEQ ID NO: 55, SEQ ID NO: 64, SEQ ID NO: 73, SEQ ID NO: 82, SEQ ID NO: 91, SEQ ID NO: 100, and SEQ ID NO: 103;
   [0226] a peptide linker having an amino acid sequence selected from the group consisting of SEQ ID NOs: 1-9; and; and
   [0227] the third domain having an amino acid sequence selected from the group consisting of SEQ ID NOs: 843-850.

[0228] In a preferred aspect of the invention the binding of the first binding domain to human FLT3 is reduced by FLT3-ligand by ≦25%, preferably ≦20%, more preferably ≦15%, further preferably ≦0%, even more preferably ≦8%, more preferably ≦6% and most preferably ≦2%.

[0229] AS described in detail in Example 18 it has been surprisingly found that constructs comprising FL-53, FL-54, FL-61, F-62, FL-63 and FL-64, which all bind to epitope cluster 3 of FLT3, still showed a binding signal above the threshold described in Example 18 although those binder have an epitope in the region described for FLT3-ligand interaction with FLT3.

[0230] Moreover, in view of the interaction of FLT3 ligand with the region of epitope cluster 3 it was further assumed that binder for more distant epitope cluster, such as cluster 1 of FLT3, would not be impacted by the FLT3 ligand competition. However, there were a significant number of binders, which did not qualify for the 75% threshold. The binder FL-1 to FL-53, FL-55 to FL-60 and FL-65 were in the group of binders not sensitive for the FLT3 ligand competition.

[0231] As described above, several preferred antibody constructs of the invention are modified by fusion with another moiety such as albumin or albumin variants. If these fusion constructs are characterized for their properties, in particular target affinity or cytotoxic activity, the skilled person will be aware that similar fusion constructs or unmodified bispecific antibody constructs can be expected to have similar (or even better) properties. For example, if a bispecific antibody construct fused with albumin has an appreciable or desirable cytotoxic activity or target affinity, it can be expected that the same/similar or even a higher cytotoxic activity/target affinity will be observed for the construct w/o albumin.

[0232] According to another preferred embodiment, the bispecific antibody construct of the invention comprises (in addition to the two binding domains) a third domain which comprises two polypeptide monomers, each comprising a hinge, a CH2 and a CH3 domain, wherein said two polypeptides (or polypeptide monomers) are fused to each other via a peptide linker. Preferably, said third domain comprises in an N- to C-terminal order: hinge-CH2-CH3-linker-hinge-CH2-CH3. Preferred amino acid sequences for said third domain are depicted in SEQ ID NOs: 843-850. Each of said two polypeptide monomers preferably has an amino acid sequence that is selected from the group consisting of SEQ ID NOs: 835-842, or that is at least 90% identical to those sequences. In another preferred embodiment, the first and second binding domains of the bispecific antibody construct of the invention are fused to the third domain via a peptide linker which is for example selected from the group consisting of SEQ ID NOs: 1, 2, 3, 4, 5, 6, 7, 8 and 9.

[0233] In line with the present invention, a “hinge” is an IgG hinge region. This region can be identified by analogy using the Kabat numbering, see Kabat positions 223-243. In line with the above, the minimal requirement for a “hinge” are the amino acid residues corresponding to the IgG₁ sequence stretch of D231 to P243 according to the Kabat numbering. The terms CH2 and CH3 refer to the immunoglobulin heavy chain constant regions 2 and 3. These regions can as well be identified by analogy using the Kabat numbering, see Kabat positions 244-360 for CH2 and Kabat positions 361-478 for CH3. Is is understood that there is some variation between the immunoglobulins in terms of their IgG₁ Fc region, IgG₂ Fc region, IgG₃ Fc region, IgG₄ Fc region, IgM Fc region, IgA Fc region, IgD Fc region and IgE Fc region (see, e.g., Padlan, Molecular Immunology, 31(3), 169-217 (1993)). The term Fc monomer refers to the last two heavy chain constant regions of IgA, IgD, and IgG, and the last three heavy chain constant regions of IgE and IgM. The Fc monomer can also include the flexible hinge N-terminal to these domains. For IgA and IgM, the Fc monomer may include the J chain. For IgG, the Fc portion comprises immunoglobulin domains CH2 and CH3 and the hinge between the first two domains and CH2. Although the boundaries of the Fc portion of an immunoglobulin may vary, an example for a human IgG heavy chain Fc portion comprising a functional hinge, CH2 and CH3 domain can be defined e.g. to comprise residues D231 (of the hinge domain) to P476 (of the C-terminus of the CH3 domain), or D231 to L476, respectively, for IgG₄, wherein the numbering is according to Kabat.

[0234] The antibody construct of the invention may hence comprise in an N- to C-terminal order:
[0235] (a) the first binding domain;
[0236] (b) a peptide linker having an amino acid sequence selected from the group consisting of SEQ ID NOs: SEQ ID NOs: 1-9;
[0237] (c) the second binding domain;
[0238] (d) a peptide linker having an amino acid sequence selected from the group consisting of SEQ ID NOs: 1, 2, 4, 5, 6, 8 and 9;
[0239] (e) the first polypeptide monomer of the third domain (comprising a hinge, a CH2 and a CH3 domain);
[0240] (f) a peptide linker having an amino acid sequence selected from the group consisting of SEQ ID NOs: 852, 853, 854 and 855; and
[0241] (g) the second polypeptide monomer of the third domain (comprising a hinge, a CH2 and a CH3 domain).

[0242] It is also preferred that the antibody construct of the invention comprises in an N- to C-terminal order:
[0243] the first binding domain having an amino acid sequence selected from the group consisting of SEQ ID NO: 159, SEQ ID NO: 169, SEQ ID NO: 179, SEQ ID NO: 189, SEQ ID NO: 199, SEQ ID NO: 209, SEQ ID NO: 219, and SEQ ID NO: 229, SEQ ID NO: 239, SEQ ID NO: 249, and SEQ ID NO: 259, SEQ ID NO: 269, SEQ ID NO: 279, and SEQ ID NO: 289, SEQ ID NO: 299, SEQ ID NO: 309, SEQ ID NO: 319, and SEQ ID NO: 329, SEQ ID NO: 339, SEQ ID NO: 349, and SEQ ID NO: 359, SEQ ID NO: 369, SEQ ID NO: 379, and SEQ ID NO: 389, SEQ ID NO: 399, SEQ ID NO: 409, SEQ ID NO: 419, and SEQ ID NO: 429, SEQ ID NO: 439, SEQ ID NO: 449, and SEQ ID NO: 459, SEQ ID NO: 469, SEQ ID NO: 479, and SEQ ID NO: 489, SEQ ID NO: 499, SEQ ID NO: 509, SEQ ID NO: 519, and SEQ ID NO: 529, SEQ ID NO: 539, SEQ ID NO: 549, and SEQ ID NO: 559, SEQ ID NO: 569, SEQ ID NO: 579, and SEQ ID NO: 589, SEQ ID NO: 599, SEQ ID NO: 609, SEQ ID NO: 619, and SEQ ID NO: 629, SEQ ID NO: 639, SEQ ID NO: 649, and SEQ ID NO: 659, SEQ ID NO: 669, SEQ ID NO: 679, and SEQ ID NO: 689, SEQ ID NO: 699, SEQ ID NO: 709, SEQ ID NO: 719, and SEQ ID NO: 729, SEQ ID NO: 739, SEQ ID NO: 749, and SEQ ID NO: 759, SEQ ID NO: 769, SEQ ID NO: 779, and SEQ ID NO: 789, and SEQ ID NO: 799;
[0244] a peptide linker having an amino acid sequence selected from the group consisting of SEQ ID NOs: 1-9;
[0245] the second binding domain having an amino acid sequence selected from the group consisting of SEQ ID NO: 19, SEQ ID NO: 28, SEQ ID NO: 37, SEQ ID NO: 46, SEQ ID NO: 55, SEQ ID NO: 64, SEQ ID NO: 73, SEQ ID NO: 82, SEQ ID NO: 91, SEQ ID NO: 100, and SEQ ID NO: 103 (see also SEQ ID NOs: 23, 25, 41, 43, 59, 61, 77, 79, 95, 97, 113, 115, 131, 133, 149, 151, 167, 169, 185 or 187 of WO 2008/119567);
[0246] a peptide linker having an amino acid sequence selected from the group consisting of SEQ ID NOs: 1, 2, 4, 5, 6, 8 and 9; and
[0247] the third domain having an amino acid sequence selected from the group consisting of SEQ ID NOs: 843-850.

[0248] In a preferred embodiment, the antibody construct of the present invention comprises or consists of a polypeptide depicted in SEQ ID NOs: 856 to 871.

[0249] In one preferred embodiment of the antibody construct of the invention the antibody construct comprises or consists of a polypeptide as depicted in SEQ ID NO: 856, 858, 860, 862, 864, 866, 868, and 870.

[0250] In one alternatively preferred embodiment of the antibody construct of the invention the antibody construct comprises or consists of a polypeptide as depicted in SEQ ID NO: 857, 859, 861, 863, 865, 867, 869, and 871.

[0251] In a preferred embodiment of the invention the antibody construct of the invention the antibody construct comprises or consists of a polypeptide as depicted in SEQ ID NO:858, 859, 862, 863, 864 and 865.

[0252] Covalent modifications of the antibody constructs are also included within the scope of this invention, and are generally, but not always, done post-translationally. For example, several types of covalent modifications of the antibody construct are introduced into the molecule by reacting specific amino acid residues of the antibody construct with an organic derivatizing agent that is capable of reacting with selected side chains or the N- or C-terminal residues.

[0253] Cysteinyl residues most commonly are reacted with α-haloacetates (and corresponding amines), such as chloroacetic acid or chloroacetamide, to give carboxymethyl or carboxyamidomethyl derivatives. Cysteinyl residues also are derivatized by reaction with bromotrifluoroacetone, α-bromo-β-(5-imidozoyl)propionic acid, chloroacetyl phosphate, N-alkylmaleimides, 3-nitro-2-pyridyl disulfide, methyl 2-pyridyl disulfide, p-chloromercuribenzoate, 2-chloromercuri-4-nitrophenol, or chloro-7-nitrobenzo-2-oxa-1,3-diazole.

[0254] Histidyl residues are derivatized by reaction with diethylpyrocarbonate at pH 5.5-7.0 because this agent is relatively specific for the histidyl side chain. Para-bromophenacyl bromide also is useful; the reaction is preferably performed in 0.1 M sodium cacodylate at pH 6.0. Lysinyl and amino terminal residues are reacted with succinic or other carboxylic acid anhydrides. Derivatization with these agents has the effect of reversing the charge of the lysinyl residues. Other suitable reagents for derivatizing alpha-amino-containing residues include imidoesters such as methyl picolinimidate; pyridoxal phosphate; pyridoxal; chloroborohydride; trinitrobenzenesulfonic acid; O-methylisourea; 2,4-pentanedione; and transaminase-catalyzed reaction with glyoxylate.

[0255] Arginyl residues are modified by reaction with one or several conventional reagents, among them phenylglyoxal, 2,3-butanedione, 1,2-cyclohexanedione, and ninhydrin. Derivatization of arginine residues requires that the reaction be performed in alkaline conditions because of the high pKa of the guanidine functional group. Furthermore, these reagents may react with the groups of lysine as well as the arginine epsilon-amino group.

[0256] The specific modification of tyrosyl residues may be made, with particular interest in introducing spectral labels into tyrosyl residues by reaction with aromatic diazonium compounds or tetranitromethane. Most commonly, N-acetylimidizole and tetranitromethane are used to form O-acetyl tyrosyl species and 3-nitro derivatives, respectively. Tyrosyl residues are iodinated using ¹²⁵I or ¹³¹I to prepare labeled proteins for use in radioimmunoassay, the chloramine T method described above being suitable.

[0257] Carboxyl side groups (aspartyl or glutamyl) are selectively modified by reaction with carbodiimides (R′—N═C═N—R′), where R and R′ are optionally different alkyl groups, such as 1-cyclohexyl-3-(2-morpholinyl-4-ethyl) carbodiimide or 1-ethyl-3-(4-azonia-4,4-dimethylpentyl) carbodiimide. Furthermore, aspartyl and glutamyl residues are converted to asparaginyl and glutaminyl residues by reaction with ammonium ions.

[0258] Derivatization with bifunctional agents is useful for crosslinking the antibody constructs of the present invention to a water-insoluble support matrix or surface for use in a variety of methods. Commonly used crosslinking agents include, e.g., 1, 1-bis(diazoacetyl)-2-phenylethane, glutaraldehyde, N-hydroxysuccinimide esters, for example, esters with 4-azidosalicylic acid, homobifunctional imidoesters, including disuccinimidyl esters such as 3,3′-dithiobis(succinimidylpropionate), and bifunctional maleimides such as bis-N-maleimido-1,8-octane. Derivatizing agents such as methyl-3-[(p-azidophenyl)dithio]propioimidate yield photoactivatable intermediates that are capable of forming crosslinks in the presence of light. Alternatively, reactive water-insoluble matrices such as cyanogen bromide-activated carbohydrates and the reactive substrates as described in U.S. Pat. Nos. 3,969,287; 3,691,016; 4,195,128; 4,247,642; 4,229,537; and 4,330,440 are employed for protein immobilization.

[0259] Glutaminyl and asparaginyl residues are frequently deamidated to the corresponding glutamyl and aspartyl residues, respectively. Alternatively, these residues are deamidated under mildly acidic conditions. Either form of these residues falls within the scope of this invention.

[0260] Other modifications include hydroxylation of proline and lysine, phosphorylation of hydroxyl groups of seryl or threonyl residues, methylation of the α-amino groups of lysine, arginine, and histidine side chains (T. E. Creighton, Proteins: Structure and Molecular Properties, W. H. Freeman & Co., San Francisco, 1983, pp. 79-86), acetylation of the N-terminal amine, and amidation of any C-terminal carboxyl group.

[0261] Another type of covalent modification of the antibody constructs included within the scope of this invention comprises altering the glycosylation pattern of the protein. As is known in the art, glycosylation patterns can depend on both the sequence of the protein (e.g., the presence or absence of particular glycosylation amino acid residues, discussed below), or the host cell or organism in which the protein is produced. Particular expression systems are discussed below.

[0262] Glycosylation of polypeptides is typically either N-linked or O-linked. N-linked refers to the attachment of the carbohydrate moiety to the side chain of an asparagine residue. The tri-peptide sequences asparagine-X-serine and asparagine-X-threonine, where X is any amino acid except proline, are the recognition sequences for enzymatic attachment of the carbohydrate moiety to the asparagine side chain. Thus, the presence of either of these tri-peptide sequences in a polypeptide creates a potential glycosylation site. O-linked glycosylation refers to the attachment of one of the sugars N-acetylgalactosamine, galactose, or xylose, to a hydroxyamino acid, most commonly serine or threonine, although 5-hydroxyproline or 5-hydroxylysine may also be used.

[0263] Addition of glycosylation sites to the antibody construct is conveniently accomplished by altering the amino acid sequence such that it contains one or more of the above-described tri-peptide sequences (for N-linked glycosylation sites). The alteration may also be made by the addition of, or substitution by, one or more serine or threonine residues to the starting sequence (for O-linked glycosylation sites). For ease, the amino acid sequence of an antibody construct is preferably altered through changes at the DNA level, particularly by mutating the DNA encoding the polypeptide at preselected bases such that codons are generated that will translate into the desired amino acids.

[0264] Another means of increasing the number of carbohydrate moieties on the antibody construct is by chemical or enzymatic coupling of glycosides to the protein. These procedures are advantageous in that they do not require production of the protein in a host cell that has glycosylation capabilities for N- and O-linked glycosylation. Depending on the coupling mode used, the sugar(s) may be attached to (a) arginine and histidine, (b) free carboxyl groups, (c) free sulfhydryl groups such as those of cysteine, (d) free hydroxyl groups such as those of serine, threonine, or hydroxyproline, (e) aromatic residues such as those of phenylalanine, tyrosine, or tryptophan, or (f) the amide group of glutamine. These methods are described in WO 87/05330, and in Aplin and Wriston, 1981, CRC Crit. Rev. Biochem., pp. 259-306.

[0265] Removal of carbohydrate moieties present on the starting antibody construct may be accomplished chemically or enzymatically. Chemical deglycosylation requires exposure of the protein to the compound trifluoromethanesulfonic acid, or an equivalent compound. This treatment results in the cleavage of most or all sugars except the linking sugar (N-acetylglucosamine or N-acetylgalactosamine), while leaving the polypeptide intact. Chemical deglycosylation is described by Hakimuddin et al., 1987, Arch. Biochem. Biophys. 259:52 and by Edge et al., 1981, Anal. Biochem. 118:131. Enzymatic cleavage of carbohydrate moieties on polypeptides can be achieved by the use of a variety of endo- and exo-glycosidases as described by Thotakura et al., 1987, Meth. Enzymol. 138:350. Glycosylation at potential glycosylation sites may be prevented by the use of the compound tunicamycin as described by Duskin et al., 1982, J. Biol. Chem. 257:3105. Tunicamycin blocks the formation of protein-N-glycoside linkages.

[0266] Other modifications of the antibody construct are also contemplated herein. For example, another type of covalent modification of the antibody construct comprises linking the antibody construct to various non-proteinaceous polymers, including, but not limited to, various polyols such as polyethylene glycol, polypropylene glycol, polyoxyalkylenes, or copolymers of polyethylene glycol and polypropylene glycol, in the manner set forth in U.S. Pat. Nos. 4,640,835; 4,496,689; 4,301,144; 4,670,417; 4,791,192 or 4,179,337. In addition, as is known in the art, amino acid substitutions may be made in various positions within the antibody construct, e.g. in order to facilitate the addition of polymers such as PEG.

[0267] In some embodiments, the covalent modification of the antibody constructs of the invention comprises the addition of one or more labels. The labelling group may be coupled to the antibody construct via spacer arms of various lengths to reduce potential steric hindrance. Various methods for labelling proteins are known in the art and can be used in performing the present invention. The term “label” or “labelling group” refers to any detectable label. In general, labels fall into a variety of classes, depending on the assay in which they are to be detected—the following examples include, but are not limited to:
[0268] a) isotopic labels, which may be radioactive or heavy isotopes, such as radioisotopes or radionuclides (e.g., ³H, ¹⁴C, ¹⁵N, ³⁵S, ⁸⁹Zr, ⁹⁰Y, ⁹⁹Tc, ¹¹¹In, ¹²⁵I, ¹³¹I)
[0269] b) magnetic labels (e.g., magnetic particles)
[0270] c) redox active moieties
[0271] d) optical dyes (including, but not limited to, chromophores, phosphors and fluorophores) such as fluorescent groups (e.g., FITC, rhodamine, lanthanide phosphors), chemiluminescent groups, and fluorophores which can be either “small molecule” fluores or proteinaceous fluores
[0272] e) enzymatic groups (e.g. horseradish peroxidase, β-galactosidase, luciferase, alkaline phosphatase)
[0273] f) biotinylated groups
[0274] g) predetermined polypeptide epitopes recognized by a secondary reporter (e.g., leucine zipper pair sequences, binding sites for secondary antibodies, metal binding domains, epitope tags, etc.)

[0275] By “fluorescent label” is meant any molecule that may be detected via its inherent fluorescent properties. Suitable fluorescent labels include, but are not limited to, fluorescein, rhodamine, tetramethylrhodamine, eosin, erythrosin, coumarin, methyl-coumarins, pyrene, Malacite green, stilbene, Lucifer Yellow, Cascade BlueJ, Texas Red, IAEDANS, EDANS, BODIPY FL, LC Red 640, Cy 5, Cy 5.5, LC Red 705, Oregon green, the Alexa-Fluor dyes (Alexa Fluor 350, Alexa Fluor 430, Alexa Fluor 488, Alexa Fluor 546, Alexa Fluor 568, Alexa Fluor 594, Alexa Fluor 633, Alexa Fluor 660, Alexa Fluor 680), Cascade Blue, Cascade Yellow and R-phycoerythrin (PE) (Molecular Probes, Eugene, Oreg.), FITC, Rhodamine, and Texas Red (Pierce, Rockford, Ill.), Cy5, Cy5.5, Cy7 (Amersham Life Science, Pittsburgh, Pa.). Suitable optical dyes, including fluorophores, are described in Molecular Probes Handbook by Richard P. Haugland.

[0276] Suitable proteinaceous fluorescent labels also include, but are not limited to, green fluorescent protein, including a Renilla, Ptilosarcus, or Aequorea species of GFP (Chalfie et al., 1994, Science 263:802-805), EGFP (Clontech Laboratories, Inc., Genbank Accession Number U55762), blue fluorescent protein (BFP, Quantum Biotechnologies, Inc. 1801 de Maisonneuve Blvd. West, 8th Floor, Montreal, Quebec, Canada H3H 1J9; Stauber, 1998, Biotechniques 24:462-471; Heim et al., 1996, Curr. Biol. 6:178-182), enhanced yellow fluorescent protein (EYFP, Clontech Laboratories, Inc.), luciferase (Ichiki et al., 1993, J. Immunol. 150:5408-5417), β galactosidase (Nolan et al., 1988, Proc. Natl. Acad. Sci. U.S.A. 85:2603-2607) and Renilla (WO92/15673, WO95/07463, WO98/14605, WO98/26277, WO99/49019, U.S. Pat. Nos. 5,292,658; 5,418,155; 5,683,888; 5,741,668; 5,777,079; 5,804,387; 5,874,304; 5,876,995; 5,925,558).

[0277] Leucine zipper domains are peptides that promote oligomerization of the proteins in which they are found. Leucine zippers were originally identified in several DNA-binding proteins (Landschulz et al., 1988, Science 240:1759), and have since been found in a variety of different proteins. Among the known leucine zippers are naturally occurring peptides and derivatives thereof that dimerize or trimerize. Examples of leucine zipper domains suitable for producing soluble oligomeric proteins are described in PCT application WO 94/10308, and the leucine zipper derived from lung surfactant protein D (SPD) described in Hoppe et al., 1994, FEBS Letters 344:191. The use of a modified leucine zipper that allows for stable trimerization of a heterologous protein fused thereto is described in Fanslow et al., 1994, Semin. Immunol. 6:267-78. In one approach, recombinant fusion proteins comprising a FLT3 antibody fragment or derivative fused to a leucine zipper peptide are expressed in suitable host cells, and the soluble oligomeric FLT3 antibody fragments or derivatives that form are recovered from the culture supernatant.

[0278] The antibody construct of the invention may also comprise additional domains, which are e.g. helpful in the isolation of the molecule or relate to an adapted pharmacokinetic profile of the molecule. Domains helpful for the isolation of an antibody construct may be selected from peptide motives or secondarily introduced moieties, which can be captured in an isolation method, e.g. an isolation column. Non-limiting embodiments of such additional domains comprise peptide motives known as Myc-tag, HAT-tag, HA-tag, TAP-tag, GST-tag, chitin binding domain (CBD-tag), maltose binding protein (MBP-tag), Flag-tag, Strep-tag and variants thereof (e.g. Strepll-tag) and His-tag. All herein disclosed antibody constructs characterized by the identified CDRs are preferred to comprise a His-tag domain, which is generally known as a repeat of consecutive His residues in the amino acid sequence of a molecule, preferably of five, and more preferably of six His residues (hexa-histidine). The His-tag may be located e.g. at the N- or C-terminus of the antibody construct, preferably it is located at the C-terminus. Most preferably, a hexa-histidine tag (HHHHHH) (SEQ ID NO:10) is linked via peptide bond to the C-terminus of the antibody construct according to the invention.

[0279] The first binding domain of the antibody construct of the present invention binds to human FLT3 on the surface of a target cell. The preferred amino acid sequence of human FLT3 is represented by NOs: 801, 803, 804, and 805. It is understood that the term “on the surface”, in the context of the present invention, means that the binding domain specifically binds to an epitope comprised within the FLT3 extracellular domain (FLT3 ECD see SEQ ID NO:813). The first binding domain according to the invention hence preferably binds to FLT3 when it is expressed by naturally expressing cells or cell lines, and/or by cells or cell lines transformed or (stably/transiently) transfected with FLT3. In a preferred embodiment the first binding domain also binds to FLT3 when FLT3 is used as a “target” or “ligand” molecule in an in vitro binding assay such as BIAcore or Scatchard. The “target cell” can be any prokaryotic or eukaryotic cell expressing FLT3 on its surface; preferably the target cell is a cell that is part of the human or animal body, such as a ovarian cancer cell, pancreatic cancer cell, mesothelioma cell, lung cancer cell, gastric cancer cell and triple negative breast cancer cell.

[0280] The term “FLT3 ECD” refers to a form of FLT3 which is essentially free of transmembrane and cytoplasmic domains of FLT3. It will be understood by the skilled artisan that the transmembrane domain identified for the FLT3 polypeptide of the present invention is identified pursuant to criteria routinely employed in the art for identifying that type of hydrophobic domain. The exact boundaries of a transmembrane domain may vary but most likely by no more than about 5 amino acids at either end of the domain specifically mentioned herein. A preferred human FLT3 ECD is shown in SEQ ID NO: 813.

[0281] The affinity of the first binding domain for human FLT3 is preferably ≦20 nM, more preferably ≦10 nM, even more preferably ≦5 nM, even more preferably ≦2 nM, even more preferably ≦1 nM, even more preferably ≦0.6 nM, even more preferably ≦0.5 nM, and most preferably ≦0.4 nM. The affinity can be measured for example in a BIAcore assay or in a Scatchard assay, e.g. as described in the Examples. Other methods of determining the affinity are also well-known to the skilled person.

[0282] Amino acid sequence modifications of the antibody constructs described herein are also contemplated. For example, it may be desirable to improve the binding affinity and/or other biological properties of the antibody construct. Amino acid sequence variants of the antibody constructs are prepared by introducing appropriate nucleotide changes into the antibody constructs nucleic acid, or by peptide synthesis. All of the below described amino acid sequence modifications should result in an antibody construct which still retains the desired biological activity (binding to FLT3 and to CD3) of the unmodified parental molecule.

[0283] The term “amino acid” or “amino acid residue” typically refers to an amino acid having its art recognized definition such as an amino acid selected from the group consisting of: alanine (Ala or A); arginine (Arg or R); asparagine (Asn or N); aspartic acid (Asp or D); cysteine (Cys or C); glutamine (Gln or Q); glutamic acid (Glu or E); glycine (Gly or G); histidine (His or H); isoleucine (He or I): leucine (Leu or L); lysine (Lys or K); methionine (Met or M); phenylalanine (Phe or F); pro line (Pro or P); serine (Ser or S); threonine (Thr or T); tryptophan (Trp or W); tyrosine (Tyr or Y); and valine (Val or V), although modified, synthetic, or rare amino acids may be used as desired. Generally, amino acids can be grouped as having a nonpolar side chain (e.g., Ala, Cys, He, Leu, Met, Phe, Pro, Val); a negatively charged side chain (e.g., Asp, Glu); a positively charged sidechain (e.g., Arg, His, Lys); or an uncharged polar side chain (e.g., Asn, Cys, Gln, Gly, His, Met, Phe, Ser, Thr, Trp, and Tyr).

[0284] Amino acid modifications include, for example, deletions from, and/or insertions into, and/or substitutions of, residues within the amino acid sequences of the antibody constructs. Any combination of deletion, insertion, and substitution is made to arrive at the final construct, provided that the final construct possesses the desired characteristics. The amino acid changes also may alter post-translational processes of the antibody constructs, such as changing the number or position of glycosylation sites.

[0285] For example, 1, 2, 3, 4, 5, or 6 amino acids may be inserted or deleted in each of the CDRs (of course, dependent on their length), while 1, 2, 3, 4, 5, 6, 7, 8, 9, 10, 11, 12, 13, 14, 15, 16, 17, 18, 19, 20, or 25 amino acids may be inserted or deleted in each of the FRs. Preferably, amino acid sequence insertions include amino- and/or carboxyl-terminal fusions ranging in length from 1, 2, 3, 4, 5, 6, 7, 8, 9 or 10 residues to polypeptides containing a hundred or more residues, as well as intra-sequence insertions of single or multiple amino acid residues. An insertional variant of the antibody construct of the invention includes the fusion to the N-terminus or to the C-terminus of the antibody construct of an enzyme or the fusion to a polypeptide which increases the serum half-life of the antibody construct.

[0286] The sites of greatest interest for substitutional mutagenesis include the CDRs of the heavy and/or light chain, in particular the hypervariable regions, but FR alterations in the heavy and/or light chain are also contemplated. The substitutions are preferably conservative substitutions as described herein. Preferably, 1, 2, 3, 4, 5, 6, 7, 8, 9, or 10 amino acids may be substituted in a CDR, while 1, 2, 3, 4, 5, 6, 7, 8, 9, 10, 11, 12, 13, 14, 15, 16, 17, 18, 19, 20, or 25 amino acids may be substituted in the framework regions (FRs), depending on the length of the CDR or FR. For example, if a CDR sequence encompasses 6 amino acids, it is envisaged that one, two or three of these amino acids are substituted. Similarly, if a CDR sequence encompasses 15 amino acids it is envisaged that one, two, three, four, five or six of these amino acids are substituted.

[0287] A useful method for identification of certain residues or regions of the antibody constructs that are preferred locations for mutagenesis is called “alanine scanning mutagenesis” as described by Cunningham and Wells in Science, 244: 1081-1085 (1989). Here, a residue or group of target residues within the antibody construct is/are identified (e.g. charged residues such as arg, asp, his, lys, and glu) and replaced by a neutral or negatively charged amino acid (most preferably alanine or polyalanine) to affect the interaction of the amino acids with the epitope.

[0288] Those amino acid locations demonstrating functional sensitivity to the substitutions are then refined by introducing further or other variants at, or for, the sites of substitution. Thus, while the site or region for introducing an amino acid sequence variation is predetermined, the nature of the mutation per se needs not to be predetermined. For example, to analyze or optimize the performance of a mutation at a given site, alanine scanning or random mutagenesis may be conducted at a target codon or region, and the expressed antibody construct variants are screened for the optimal combination of desired activity. Techniques for making substitution mutations at predetermined sites in the DNA having a known sequence are well known, for example, M13 primer mutagenesis and PCR mutagenesis. Screening of the mutants is done using assays of antigen binding activities, such as FLT3 or CD3 binding.

[0289] Generally, if amino acids are substituted in one or more or all of the CDRs of the heavy and/or light chain, it is preferred that the then-obtained “substituted” sequence is at least 60% or 65%, more preferably 70% or 75%, even more preferably 80% or 85%, and particularly preferably 90% or 95% identical to the “original” CDR sequence. This means that it is dependent of the length of the CDR to which degree it is identical to the “substituted” sequence. For example, a CDR having 5 amino acids is preferably 80% identical to its substituted sequence in order to have at least one amino acid substituted. Accordingly, the CDRs of the antibody construct may have different degrees of identity to their substituted sequences, e.g., CDRL1 may have 80%, while CDRL3 may have 90%.

[0290] Preferred substitutions (or replacements) are conservative substitutions. However, any substitution (including non-conservative substitution or one or more from the “exemplary substitutions” listed in Table 1, below) is envisaged as long as the antibody construct retains its capability to bind to FLT3 via the first binding domain and to CD3 or CD3 epsilon via the second binding domain and/or its CDRs have an identity to the then substituted sequence (at least 60% or 65%, more preferably 70% or 75%, even more preferably 80% or 85%, and particularly preferably 90% or 95% identical to the “original” CDR sequence).

[0291] Conservative substitutions are shown in Table 1 under the heading of “preferred substitutions”. If such substitutions result in a change in biological activity, then more substantial changes, denominated “exemplary substitutions” in Table 1, or as further described below in reference to amino acid classes, may be introduced and the products screened for a desired characteristic.

TABLE 1
Amino acid substitutions

| Original | Exemplary Substitutions | Preferred Substitutions |
|---|---|---|
| Ala (A) | val, leu, ile | val |
| Arg (R) | lys, gln, asn | lys |
| Asn (N) | gln, his, asp, lys, arg | gln |
| Asp (D) | glu, asn | glu |
| Cys (C) | ser, ala | ser |
| Gln (Q) | asn, glu | asn |
| Glu (E) | asp, gln | asp |
| Gly (G) | Ala | ala |
| His (H) | asn, gln, lys, arg | arg |
| Ile (I) | leu, val, met, ala, phe | leu |
| Leu (L) | norleucine, ile, val, met, ala | ile |
| Lys (K) | arg, gln, asn | arg |
| Met (M) | leu, phe, ile | leu |
| Phe (F) | leu, val, ile, ala, tyr | tyr |
| Pro (P) | Ala | ala |
| Ser (S) | Thr | thr |
| Thr (T) | Ser | ser |
| Trp (W) | tyr, phe | tyr |
| Tyr (Y) | trp, phe, thr, ser | phe |
| Val (V) | ile, leu, met, phe, ala | leu |

[0292] Substantial modifications in the biological properties of the antibody construct of the present invention are accomplished by selecting substitutions that differ significantly in their effect on maintaining (a) the structure of the polypeptide backbone in the area of the substitution, for example, as a sheet or helical conformation, (b) the charge or hydrophobicity of the molecule at the target site, or (c) the bulk of the side chain. Naturally occurring residues are divided into groups based on common side-chain properties: (1) hydrophobic: norleucine, met, ala, val, leu, ile; (2) neutral hydrophilic: cys, ser, thr; (3) acidic: asp, glu; (4) basic: asn, gin, his, lys, arg; (5) residues that influence chain orientation: gly, pro; and (6) aromatic: trp, tyr, phe.

[0293] Non-conservative substitutions will entail exchanging a member of one of these classes for another class. Any cysteine residue not involved in maintaining the proper conformation of the antibody construct may be substituted, generally with serine, to improve the oxidative stability of the molecule and prevent aberrant crosslinking. Conversely, cysteine bond(s) may be added to the antibody to improve its stability (particularly where the antibody is an antibody fragment such as an Fv fragment).

[0294] For amino acid sequences, sequence identity and/or similarity is determined by using standard techniques known in the art, including, but not limited to, the local sequence identity algorithm of Smith and Waterman, 1981, Adv. Appl. Math. 2:482, the sequence identity alignment algorithm of Needleman and Wunsch, 1970, J. Mol. Biol. 48:443, the search for similarity method of Pearson and Lipman, 1988, Proc. Nat. Acad. Sci. U.S.A. 85:2444, computerized implementations of these algorithms (GAP, BESTFIT, FASTA, and TFASTA in the Wisconsin Genetics Software Package, Genetics Computer Group, 575 Science Drive, Madison, Wis.), the Best Fit sequence program described by Devereux et al., 1984, Nucl. Acid Res. 12:387-395, preferably using the default settings, or by inspection. Preferably, percent identity is calculated by FastDB based upon the following parameters: mismatch penalty of 1; gap penalty of 1; gap size penalty of 0.33; and joining penalty of 30, “Current Methods in Sequence Comparison and Analysis,” Macromolecule Sequencing and Synthesis, Selected Methods and Applications, pp 127-149 (1988), Alan R. Liss, Inc.

[0295] An example of a useful algorithm is PILEUP. PILEUP creates a multiple sequence alignment from a group of related sequences using progressive, pairwise alignments. It can also plot a tree showing the clustering relationships used to create the alignment. PILEUP uses a simplification of the progressive alignment method of Feng & Doolittle, 1987, J. Mol. Evol. 35:351-360; the method is similar to that described by Higgins and Sharp, 1989, CABIOS 5:151-153. Useful PILEUP parameters including a default gap weight of 3.00, a default gap length weight of 0.10, and weighted end gaps.

[0296] Another example of a useful algorithm is the BLAST algorithm, described in: Altschul et al., 1990, J. Mol. Biol. 215:403-410; Altschul et al., 1997, Nucleic Acids Res. 25:3389-3402; and Karin et al., 1993, Proc. Natl. Acad. Sci. U.S.A. 90:5873-5787. A particularly useful BLAST program is the WU-BLAST-2 program which was obtained from Altschul et al., 1996, Methods in Enzymology 266:460-480. WU-BLAST-2 uses several search parameters, most of which are set to the default values. The adjustable parameters are set with the following values: overlap span=1, overlap fraction=0.125, word threshold (T)=II. The HSP Sand HSP S2 parameters are dynamic values and are established by the program itself depending upon the composition of the particular sequence and composition of the particular database against which the sequence of interest is being searched; however, the values may be adjusted to increase sensitivity.

[0297] An additional useful algorithm is gapped BLAST as reported by Altschul et al., 1993, Nucl. Acids Res. 25:3389-3402. Gapped BLAST uses BLOSUM-62 substitution scores; threshold T parameter set to 9; the two-hit method to trigger ungapped extensions, charges gap lengths of k a cost of 10+k; Xu set to 16, and Xg set to 40 for database search stage and to 67 for the output stage of the algorithms. Gapped alignments are triggered by a score corresponding to about 22 bits.

[0298] Generally, the amino acid homology, similarity, or identity between individual variant CDRs are at least 60% to the sequences depicted herein, and more typically with preferably increasing homologies or identities of at least 65% or 70%, more preferably at least 75% or 80%, even more preferably at least 85%, 90%, 91%, 92%, 93%, 94%, 95%, 96%, 97%, 98%, 99%, and almost 100%. In a similar manner, “percent (%) nucleic acid sequence identity” with respect to the nucleic acid sequence of the binding proteins identified herein is defined as the percentage of nucleotide residues in a candidate sequence that are identical with the nucleotide residues in the coding sequence of the antibody construct. A specific method utilizes the BLASTN module of WU-BLAST-2 set to the default parameters, with overlap span and overlap fraction set to 1 and 0.125, respectively.

[0299] Generally, the nucleic acid sequence homology, similarity, or identity between the nucleotide sequences encoding individual variant CDRs and the nucleotide sequences depicted herein are at least 60%, and more typically with preferably increasing homologies or identities of at least 65%, 70%, 75%, 80%, 81%, 82%, 83%, 84%, 85%, 86%, 87%, 88%, 89%, 90%, 91%, 92%, 93%, 94%, 95%, 96%, 97%, 98%, or 99%, and almost 100%. Thus, a “variant CDR” is one with the specified homology, similarity, or identity to the parent CDR of the invention, and shares biological function, including, but not limited to, at least 60%, 65%, 70%, 75%, 80%, 81%, 82%, 83%, 84%, 85%, 86%, 87%, 88%, 89%, 90%, 91%, 92%, 93%, 94%, 95%, 96%, 97%, 98%, or 99% of the specificity and/or activity of the parent CDR.

[0300] In one embodiment, the percentage of identity to human germline of the antibody constructs according to the invention is ≧70% or ≧75%, more preferably ≧80% or ≧85%, even more preferably ≧90%, and most preferably ≧91%, ≧92%, ≧93%, ≧94%, ≧95% or even ≧96%. See Example 8. Identity to human antibody germline gene products is thought to be an important feature to reduce the risk of therapeutic proteins to elicit an immune response against the drug in the patient during treatment. Hwang & Foote (“Immunogenicity of engineered antibodies”; Methods 36 (2005) 3-10) demonstrate that the reduction of non-human portions of drug antibody constructs leads to a decrease of risk to induce anti-drug antibodies in the patients during treatment. By comparing an exhaustive number of clinically evaluated antibody drugs and the respective immunogenicity data, the trend is shown that humanization of the V-regions of antibodies makes the protein less immunogenic (average 5.1% of patients) than antibodies carrying unaltered non-human V regions (average 23.59% of patients). A higher degree of identity to human sequences is hence desirable for V-region based protein therapeutics in the form of antibody constructs. For this purpose of determining the germline identity, the V-regions of VL can be aligned with the amino acid sequences of human germline segments and J segments (http://vbase.mrc-cpe.cam.ac.uk/) using Vector NTI software and the amino acid sequence calculated by dividing the identical amino acid residues by the total number of amino acid residues of the VL in percent. The same can be for the VH segments (http://vbase.mrc-cpe.cam.ac.uk/) with the exception that the VH CDR3 may be excluded due to its high diversity and a lack of existing human germline VH CDR3 alignment partners. Recombinant techniques can then be used to increase sequence identity to human antibody germline genes.

[0301] In a further embodiment, the bispecific antibody constructs of the present invention exhibit high monomer yields under standard research scale conditions, e.g., in a standard two-step purification process. Preferably the monomer yield of the antibody constructs according to the invention is ≧0.25 mg/L supernatant, more preferably ≧0.5 mg/L, even more preferably ≧1 mg/L, and most preferably ≧3 mg/L supernatant.

[0302] Likewise, the yield of the dimeric antibody construct isoforms and hence the monomer percentage (i.e., monomer: (monomer+dimer)) of the antibody constructs can be determined. The productivity of monomeric and dimeric antibody constructs and the calculated monomer percentage can e.g. be obtained in the SEC purification step of culture supernatant from standardized research-scale production in roller bottles. In one embodiment, the monomer percentage of the antibody constructs is ≧80%, more preferably ≧85%, even more preferably ≧90%, and most preferably ≧95%.

[0303] In one embodiment, the antibody constructs have a preferred plasma stability (ratio of EC50 with plasma to EC50 w/o plasma) of ≦5 or ≦4, more preferably ≦3.5 or ≦3, even more preferably ≦2.5 or ≦2, and most preferably ≦1.5 or ≦1. The plasma stability of an antibody construct can be tested by incubation of the construct in human plasma at 37° C. for 24 hours followed by EC50 determination in a 51-chromium release cytotoxicity assay. The effector cells in the cytotoxicity assay can be stimulated enriched human CD8 positive T cells. Target cells can e.g. be CHO cells transfected with human FLT3. The effector to target cell (E:T) ratio can be chosen as 10:1. The human plasma pool used for this purpose is derived from the blood of healthy donors collected by EDTA coated syringes. Cellular components are removed by centrifugation and the upper plasma phase is collected and subsequently pooled. As control, antibody constructs are diluted immediately prior to the cytotoxicity assay in RPMI-1640 medium. The plasma stability is calculated as ratio of EC50 (after plasma incubation) to EC50 (control). See Example 13.

[0304] It is furthermore preferred that the monomer to dimer conversion of antibody constructs of the invention is low. The conversion can be measured under different conditions and analyzed by high performance size exclusion chromatography. See Example 11. For example, incubation of the monomeric isoforms of the antibody constructs can be carried out for 7 days at 37° C. and concentrations of e.g. 100 μg/ml or 250 μg/ml in an incubator. Under these conditions, it is preferred that the antibody constructs of the invention show a dimer percentage that is ≦5%, more preferably ≦4%, even more preferably ≦3%, even more preferably ≦2.5%, even more preferably ≦2%, even more preferably ≦1.5%, and most preferably ≦1%, or ≦0.5% or even 0%.

[0305] It is also preferred that the bispecific antibody constructs of the present invention present with very low dimer conversion after a number of freeze/thaw cycles. For example, the antibody construct monomer is adjusted to a concentration of 250 μg/ml e.g. in generic formulation buffer and subjected to three freeze/thaw cycles (freezing at −80° C. for 30 min followed by thawing for 30 min at room temperature), followed by high performance SEC to determine the percentage of initially monomeric antibody construct, which had been converted into dimeric antibody construct. Preferably the dimer percentages of the bispecific antibody constructs are ≦5%, more preferably ≦4%, even more preferably ≦3%, even more preferably ≦2.5%, even more preferably ≦2%, even more preferably ≦1.5%, and most preferably ≦1% or even ≦0.5%, for example after three freeze/thaw cycles.

[0306] The bispecific antibody constructs of the present invention preferably show a favorable thermostability with aggregation temperatures ≧45° C. or ≧50° C., more preferably ≧52° C. or ≧54° C., even more preferably ≧56° C. or ≧57° C., and most preferably ≧58° C. or ≧59° C. The thermostability parameter can be determined in terms of antibody aggregation temperature as follows: Antibody solution at a concentration 250 μg/ml is transferred into a single use cuvette and placed in a Dynamic Light Scattering (DLS) device. The sample is heated from 40° C. to 70° C. at a heating rate of 0.5° C./min with constant acquisition of the measured radius. Increase of radius indicating melting of the protein and aggregation is used to calculate the aggregation temperature of the antibody. See Example 12.

[0307] Alternatively, temperature melting curves can be determined by Differential Scanning calorimetry (DSC) to determine intrinsic biophysical protein stabilities of the antibody constructs. These experiments are performed using a MicroCal LLC (Northampton, MA, U.S.A) VP-DSC device. The energy uptake of a sample containing an antibody construct is recorded from 20° C. to 90° C. compared to a sample containing only the formulation buffer. The antibody constructs are adjusted to a final concentration of 250 μg/ml e.g. in SEC running buffer. For recording of the respective melting curve, the overall sample temperature is increased stepwise. At each temperature T energy uptake of the sample and the formulation buffer reference is recorded. The difference in energy uptake Cp (kcal/mole/° C.) of the sample minus the reference is plotted against the respective temperature. The melting temperature is defined as the temperature at the first maximum of energy uptake.

[0308] It is furthermore envisaged that the FLT3×CD3 bispecific antibody constructs of the invention do not cross-react with (i.e., do not essentially bind to) the human FLT3 paralogues KIT v1 (SEQ ID NO: 805), CSF1R v1 (SEQ ID NO: 806), PDGFRA (SEQ ID NO: 807), and/or NTM v3 (SEQ ID NO: 808). Furthermore, it is envisaged that the FLT3×CD3 bispecific antibody constructs of the invention do not cross-react with (i.e., do not essentially bind to) the macaque/cyno FLT3 paralogues KIT v1, CSF1R v1, PDGFRA and/or NTM v3. See Example 7.

[0309] The FLT3×CD3 bispecific antibody constructs of the invention are also envisaged to have a turbidity (as measured by CD340 after concentration of purified monomeric antibody construct to 2.5 mg/ml and over night incubation) of 0.2, preferably of 0.15, more preferably of 0.12, even more preferably of 0.1, and most preferably of 0.08. See Example 14.

[0310] In a further embodiment the antibody construct according to the invention is stable at acidic pH. The more tolerant the antibody construct behaves at unphysiologic pH such as pH 5.5 (a pH which is required to run e.g. a cation exchange chromatography), the higher is the recovery of the antibody construct eluted from an ion exchange column relative to the total amount of loaded protein. Recovery of the antibody construct from an ion (e.g., cation) exchange column at pH 5.5 is preferably ≧30%, more preferably ≧40%, more preferably ≧50%, even more preferably ≧60%, even more preferably ≧70%, even more preferably ≧80%, even more preferably ≧90%, even more preferably ≧95%, and most preferably ≧99%. See Example 15.

[0311] It is furthermore envisaged that the bispecific antibody constructs of the present invention exhibit therapeutic efficacy or anti-tumor activity. This can e.g. be assessed in a study as disclosed in the following example of an advanced stage human tumor xenograft model:

[0312] On day 1 of the study, 5×10⁶ cells of a human FLT3 positive cancer cell line (e.g. OVCAR-8) are subcutaneously injected in the right dorsal flank of female NOD/SCID mice. When the mean tumor volume reaches about 100 mm³, in vitro expanded human CD3 positive T cells are transplanted into the mice by injection of about 2×10⁷ cells into the peritoneal cavity of the animals. Mice of vehicle control group 1 do not receive effector cells and are used as an untransplanted control for comparison with vehicle control group 2 (receiving effector cells) to monitor the impact of T cells alone on tumor growth. The antibody treatment starts when the mean tumor volume reaches about 200 mm³. The mean tumor size of each treatment group on the day of treatment start should not be statistically different from any other group (analysis of variance). Mice are treated with 0.5 mg/kg/day of a FLT3×CD3 bispecifc antibody construct by intravenous bolus injection for about 15 to 20 days. Tumors are measured by caliper during the study and progress evaluated by intergroup comparison of tumor volumes (TV). The tumor growth inhibition T/C [%] is determined by calculating TV as T/C %=100×(median TV of analyzed group)/(median TV of control group 2).

[0313] The skilled person knows how to modify or adapt certain parameters of this study, such as the number of injected tumor cells, the site of injection, the number of transplanted human T cells, the amount of bispecific antibody constructs to be administered, and the timelines, while still arriving at a meaningful and reproducible result. Preferably, the tumor growth inhibition T/C [%] is ≦70 or ≦60, more preferably ≦50 or ≦40, even more preferably ≦30 or ≦20 and most preferably ≦10 or ≦5 or even ≦2.5.

[0314] The invention further provides a polynucleotide/nucleic acid molecule encoding an antibody construct of the invention.

[0315] A polynucleotide is a biopolymer composed of 13 or more nucleotide monomers covalently bonded in a chain. DNA (such as cDNA) and RNA (such as mRNA) are examples of polynucleotides with distinct biological function. Nucleotides are organic molecules that serve as the monomers or subunits of nucleic acid molecules like DNA or RNA. The nucleic acid molecule or polynucleotide can be double stranded and single stranded, linear and circular. It is preferably comprised in a vector which is preferably comprised in a host cell. Said host cell is, e.g. after transformation or transfection with the vector or the polynucleotide of the invention, capable of expressing the antibody construct. For that purpose the polynucleotide or nucleic acid molecule is operatively linked with control sequences.

[0316] The genetic code is the set of rules by which information encoded within genetic material (nucleic acids) is translated into proteins. Biological decoding in living cells is accomplished by the ribosome which links amino acids in an order specified by mRNA, using tRNA molecules to carry amino acids and to read the mRNA three nucleotides at a time. The code defines how sequences of these nucleotide triplets, called codons, specify which amino acid will be added next during protein synthesis. With some exceptions, a three-nucleotide codon in a nucleic acid sequence specifies a single amino acid. Because the vast majority of genes are encoded with exactly the same code, this particular code is often referred to as the canonical or standard genetic code. While the genetic code determines the protein sequence for a given coding region, other genomic regions can influence when and where these proteins are produced.

[0317] Furthermore, the invention provides a vector comprising a polynucleotide/nucleic acid molecule of the invention.

[0318] A vector is a nucleic acid molecule used as a vehicle to transfer (foreign) genetic material into a cell. The term “vector” encompasses—but is not restricted to—plasmids, viruses, cosmids and artificial chromosomes. In general, engineered vectors comprise an origin of replication, a multicloning site and a selectable marker. The vector itself is generally a nucleotide sequence, commonly a DNA sequence, that comprises an insert (transgene) and a larger sequence that serves as the “backbone” of the vector. Modern vectors may encompass additional features besides the transgene insert and a backbone: promoter, genetic marker, antibiotic resistance, reporter gene, targeting sequence, protein purification tag. Vectors called expression vectors (expression constructs) specifically are for the expression of the transgene in the target cell, and generally have control sequences.

[0319] The term “control sequences” refers to DNA sequences necessary for the expression of an operably linked coding sequence in a particular host organism. The control sequences that are suitable for prokaryotes, for example, include a promoter, optionally an operator sequence, and a ribosome binding site. Eukaryotic cells are known to utilize promoters, polyadenylation signals, and enhancers.

[0320] A nucleic acid is “operably linked” when it is placed into a functional relationship with another nucleic acid sequence. For example, DNA for a presequence or secretory leader is operably linked to DNA for a polypeptide if it is expressed as a preprotein that participates in the secretion of the polypeptide; a promoter or enhancer is operably linked to a coding sequence if it affects the transcription of the sequence; or a ribosome binding site is operably linked to a coding sequence if it is positioned so as to facilitate translation. Generally, “operably linked” means that the DNA sequences being linked are contiguous, and, in the case of a secretory leader, contiguous and in reading phase. However, enhancers do not have to be contiguous. Linking is accomplished by ligation at convenient restriction sites. If such sites do not exist, the synthetic oligonucleotide adaptors or linkers are used in accordance with conventional practice.

[0321] “Transfection” is the process of deliberately introducing nucleic acid molecules or polynucleotides (including vectors) into target cells. The term is mostly used for non-viral methods in eukaryotic cells. Transduction is often used to describe virus-mediated transfer of nucleic acid molecules or polynucleotides. Transfection of animal cells typically involves opening transient pores or “holes” in the cell membrane, to allow the uptake of material. Transfection can be carried out using calcium phosphate, by electroporation, by cell squeezing or by mixing a cationic lipid with the material to produce liposomes, which fuse with the cell membrane and deposit their cargo inside.

[0322] The term “transformation” is used to describe non-viral transfer of nucleic acid molecules or polynucleotides (including vectors) into bacteria, and also into non-animal eukaryotic cells, including plant cells. Transformation is hence the genetic alteration of a bacterial or non-animal eukaryotic cell resulting from the direct uptake through the cell membrane(s) from its surroundings and subsequent incorporation of exogenous genetic material (nucleic acid molecules). Transformation can be effected by artificial means. For transformation to happen, cells or bacteria must be in a state of competence, which might occur as a time-limited response to environmental conditions such as starvation and cell density.

[0323] Moreover, the invention provides a host cell transformed or transfected with the polynucleotide/nucleic acid molecule or with the vector of the invention.

[0324] As used herein, the terms “host cell” or “recipient cell” are intended to include any individual cell or cell culture that can be or has/have been recipients of vectors, exogenous nucleic acid molecules, and polynucleotides encoding the antibody construct of the present invention; and/or recipients of the antibody construct itself. The introduction of the respective material into the cell is carried out by way of transformation, transfection and the like. The term “host cell” is also intended to include progeny or potential progeny of a single cell. Because certain modifications may occur in succeeding generations due to either natural, accidental, or deliberate mutation or due to environmental influences, such progeny may not, in fact, be completely identical (in morphology or in genomic or total DNA complement) to the parent cell, but is still included within the scope of the term as used herein. Suitable host cells include prokaryotic or eukaryotic cells, and also include but are not limited to bacteria, yeast cells, fungi cells, plant cells, and animal cells such as insect cells and mammalian cells, e.g., murine, rat, macaque or human.

[0325] The antibody construct of the invention can be produced in bacteria. After expression, the antibody construct of the invention is isolated from the E. coli cell paste in a soluble fraction and can be purified through, e.g., affinity chromatography and/or size exclusion. Final purification can be carried out similar to the process for purifying antibody expressed e.g., in CHO cells.

[0326] In addition to prokaryotes, eukaryotic microbes such as filamentous fungi or yeast are suitable cloning or expression hosts for the antibody construct of the invention. Saccharomyces cerevisiae, or common baker's yeast, is the most commonly used among lower eukaryotic host microorganisms. However, a number of other genera, species, and strains are commonly available and useful herein, such as Schizosaccharomyces pombe, Kluyveromyces hosts such as K. lactis, K. fragilis (ATCC 12424), K. bulgaricus (ATCC 16045), K. wickeramii (ATCC 24178), K. waltii (ATCC 56500), K. drosophilarum (ATCC 36906), K. thermotolerans, and K. marxianus; yarrowia (EP 402 226); Pichia pastoris (EP 183 070); Candida; Trichoderma reesia (EP 244 234); Neurospora crassa; Schwanniomyces such as Schwanniomyces occidentalis; and filamentous fungi such as Neurospora, Penicillium, Tolypocladium, and Aspergillus hosts such as A. nidulans and A. niger.

[0327] Suitable host cells for the expression of glycosylated antibody construct of the invention are derived from multicellular organisms. Examples of invertebrate cells include plant and insect cells. Numerous baculoviral strains and variants and corresponding permissive insect host cells from hosts such as Spodoptera fruoperda (caterpillar), Aedes aegypti (mosquito), Aedes albopictus (mosquito), Drosophila melanogaster (fruit fly), and Bombyx mori have been identified. A variety of viral strains for transfection are publicly available, e.g., the L-1 variant of Autographa californica NPV and the Bm-5 strain of Bombyx mori NPV, and such viruses may be used as the virus herein according to the present invention, particularly for transfection of Spodoptera frugiperda cells.

[0328] Plant cell cultures of cotton, corn, potato, soybean, petunia, tomato, Arabidopsis and tobacco can also be used as hosts. Cloning and expression vectors useful in the production of proteins in plant cell culture are known to those of skill in the art. See e.g. Hiatt et al., Nature (1989) 342: 76-78, Owen et al. (1992) Bio/Technology 10: 790-794, Artsaenko et al. (1995) The Plant J 8: 745-750, and Fecker et al. (1996) Plant Mol Biol 32: 979-986.

[0329] However, interest has been greatest in vertebrate cells, and propagation of vertebrate cells in culture (tissue culture) has become a routine procedure. Examples of useful mammalian host cell lines are monkey kidney CV1 line transformed by SV40 (COS-7, ATCC CRL 1651); human embryonic kidney line (293 or 293 cells subcloned for growth in suspension culture, Graham et al., J. Gen Virol. 36: 59 (1977)); baby hamster kidney cells (BHK, ATCC CCL 10); Chinese hamster ovary cells/−DHFR (CHO, Urlaub et al., Proc. Natl. Acad. Sci. USA 77: 4216 (1980)); mouse sertoli cells (TM4, Mather, Biol. Reprod. 23: 243-251 (1980)); monkey kidney cells (CVI ATCC CCL 70); African green monkey kidney cells (VERO-76, ATCC CRL1587); human cervical carcinoma cells (HELA, ATCC CCL 2); canine kidney cells (MDCK, ATCC CCL 34); buffalo rat liver cells (BRL 3A, ATCC CRL 1442); human lung cells (W138, ATCC CCL 75); human liver cells (Hep G2,1413 8065); mouse mammary tumor (MMT 060562, ATCC CCL5 1); TRI cells (Mather et al., Annals N. Y Acad. Sci. (1982) 383: 44-68); MRC 5 cells; F54 cells; and a human hepatoma line (Hep G2).

[0330] In a further embodiment the invention provides a process for the production of an antibody construct of the invention, said process comprising culturing a host cell of the invention under conditions allowing the expression of the antibody construct of the invention and recovering the produced antibody construct from the culture.

[0331] As used herein, the term “culturing” refers to the in vitro maintenance, differentiation, growth, proliferation and/or propagation of cells under suitable conditions in a medium. The term “expression” includes any step involved in the production of an antibody construct of the invention including, but not limited to, transcription, post-transcriptional modification, translation, post-translational modification, and secretion.

[0332] When using recombinant techniques, the antibody construct can be produced intracellularly, in the periplasmic space, or directly secreted into the medium. If the antibody construct is produced intracellularly, as a first step, the particulate debris, either host cells or lysed fragments, are removed, for example, by centrifugation or ultrafiltration. Carter et al., Bio/Technology 10: 163-167 (1992) describe a procedure for isolating antibodies which are secreted to the periplasmic space of E. coli. Briefly, cell paste is thawed in the presence of sodium acetate (pH 3.5), EDTA, and phenylmethylsulfonylfluoride (PMSF) over about 30 min. Cell debris can be removed by centrifugation. Where the antibody is secreted into the medium, supernatants from such expression systems are generally first concentrated using a commercially available protein concentration filter, for example, an Amicon or Millipore Pellicon ultrafiltration unit. A protease inhibitor such as PMSF may be included in any of the foregoing steps to inhibit proteolysis and antibiotics may be included to prevent the growth of adventitious contaminants.

[0333] The antibody construct of the invention prepared from the host cells can be recovered or purified using, for example, hydroxylapatite chromatography, gel electrophoresis, dialysis, and affinity chromatography. Other techniques for protein purification such as fractionation on an ion-exchange column, ethanol precipitation, Reverse Phase HPLC, chromatography on silica, chromatography on heparin SEPHAROSE™, chromatography on an anion or cation exchange resin (such as a polyaspartic acid column), chromato-focusing, SDS-PAGE, and ammonium sulfate precipitation are also available depending on the antibody to be recovered. Where the antibody construct of the invention comprises a CH3 domain, the Bakerbond ABX resin (J. T. Baker, Phillipsburg, N.J.) is useful for purification.

[0334] Affinity chromatography is a preferred purification technique. The matrix to which the affinity ligand is attached is most often agarose, but other matrices are available. Mechanically stable matrices such as controlled pore glass or poly (styrenedivinyl) benzene allow for faster flow rates and shorter processing times than can be achieved with agarose.

[0335] Moreover, the invention provides a pharmaceutical composition comprising an antibody construct of the invention or an antibody construct produced according to the process of the invention. It is preferred for the pharmaceutical composition of the invention that the homogeneity of the antibody construct is ≧80%, more preferably ≧81%, ≧82%, ≧83%, ≧84%, or ≧85%, further preferably ≧86%, ≧87%, ≧88%, ≧89%, or ≧90%, still further preferably, ≧91%, ≧92%, ≧93%, ≧94%, or ≧95% and most preferably ≧96%, ≧97%, ≧98% or ≧99%.

[0336] As used herein, the term “pharmaceutical composition” relates to a composition which is suitable for administration to a patient, preferably a human patient. The particularly preferred pharmaceutical composition of this invention comprises one or a plurality of the antibody construct(s) of the invention, preferably in a therapeutically effective amount. Preferably, the pharmaceutical composition further comprises suitable formulations of one or more (pharmaceutically effective) carriers, stabilizers, excipients, diluents, solubilizers, surfactants, emulsifiers, preservatives and/or adjuvants. Acceptable constituents of the composition are preferably nontoxic to recipients at the dosages and concentrations employed. Pharmaceutical compositions of the invention include, but are not limited to, liquid, frozen, and lyophilized compositions.

[0337] The inventive compositions may comprise a pharmaceutically acceptable carrier. In general, as used herein, “pharmaceutically acceptable carrier” means any and all aqueous and non-aqueous solutions, sterile solutions, solvents, buffers, e.g. phosphate buffered saline (PBS) solutions, water, suspensions, emulsions, such as oil/water emulsions, various types of wetting agents, liposomes, dispersion media and coatings, which are compatible with pharmaceutical administration, in particular with parenteral administration. The use of such media and agents in pharmaceutical compositions is well known in the art, and the compositions comprising such carriers can be formulated by well-known conventional methods.

[0338] Certain embodiments provide pharmaceutical compositions comprising the antibody construct of the invention and further one or more excipients such as those illustratively described in this section and elsewhere herein. Excipients can be used in the invention in this regard for a wide variety of purposes, such as adjusting physical, chemical, or biological properties of formulations, such as adjustment of viscosity, and or processes of the invention to improve effectiveness and or to stabilize such formulations and processes against degradation and spoilage due to, for instance, stresses that occur during manufacturing, shipping, storage, pre-use preparation, administration, and thereafter.

[0339] In certain embodiments, the pharmaceutical composition may contain formulation materials for the purpose of modifying, maintaining or preserving, e.g., the pH, osmolarity, viscosity, clarity, color, isotonicity, odor, sterility, stability, rate of dissolution or release, adsorption or penetration of the composition (see, REMINGTON'S PHARMACEUTICAL SCIENCES, 18″ Edition, (A. R. Genrmo, ed.), 1990, Mack Publishing Company). In such embodiments, suitable formulation materials may include, but are not limited to:
[0340] amino acids such as glycine, alanine, glutamine, asparagine, threonine, proline, 2-phenylalanine, including charged amino acids, preferably lysine, lysine acetate, arginine, glutamate and/or histidine
[0341] antimicrobials such as antibacterial and antifungal agents
[0342] antioxidants such as ascorbic acid, methionine, sodium sulfite or sodium hydrogen-sulfite;
[0343] buffers, buffer systems and buffering agents which are used to maintain the composition at physiological pH or at a slightly lower pH, typically within a pH range of from about 5 to about 8 or 9; examples of buffers are borate, bicarbonate, Tris-HCl, citrates, phosphates or other organic acids, succinate, phosphate, histidine and acetate; for example Tris buffer of about pH 7.0-8.5, or acetate buffer of about pH 4.0-5.5;
[0344] non-aqueous solvents such as propylene glycol, polyethylene glycol, vegetable oils such as olive oil, and injectable organic esters such as ethyl oleate;
[0345] aqueous carriers including water, alcoholic/aqueous solutions, emulsions or suspensions, including saline and buffered media;
[0346] biodegradable polymers such as polyesters;
[0347] bulking agents such as mannitol or glycine;
[0348] chelating agents such as ethylenediamine tetraacetic acid (EDTA);
[0349] isotonic and absorption delaying agents;
[0350] complexing agents such as caffeine, polyvinylpyrrolidone, beta-cyclodextrin or hydroxypropyl-beta-cyclodextrin)
[0351] fillers;
[0352] monosaccharides; disaccharides; and other carbohydrates (such as glucose, mannose or dextrins); carbohydrates may be non-reducing sugars, preferably trehalose, sucrose, octasulfate, sorbitol or xylitol;
[0353] (low molecular weight) proteins, polypeptides or proteinaceous carriers such as human or bovine serum albumin, gelatin or immunoglobulins, preferably of human origin;
[0354] coloring and flavouring agents;
[0355] sulfur containing reducing agents, such as glutathione, thioctic acid, sodium thioglycolate, thioglycerol, [alpha]-monothioglycerol, and sodium thio sulfate
[0356] diluting agents;
[0357] emulsifying agents;
[0358] hydrophilic polymers such as polyvinylpyrrolidone)
[0359] salt-forming counter-ions such as sodium;
[0360] preservatives such as antimicrobials, anti-oxidants, chelating agents, inert gases and the like; examples are: benzalkonium chloride, benzoic acid, salicylic acid, thimerosal, phenethyl alcohol, methylparaben, propylparaben, chlorhexidine, sorbic acid or hydrogen peroxide);
[0361] metal complexes such as Zn-protein complexes;
[0362] solvents and co-solvents (such as glycerin, propylene glycol or polyethylene glycol);
[0363] sugars and sugar alcohols, such as trehalose, sucrose, octasulfate, mannitol, sorbitol or xylitol stachyose, mannose, sorbose, xylose, ribose, myoinisitose, galactose, lactitol, ribitol, myoinisitol, galactitol, glycerol, cyclitols (e.g., inositol), polyethylene glycol; and polyhydric sugar alcohols;
[0364] suspending agents;
[0365] surfactants or wetting agents such as pluronics, PEG, sorbitan esters, polysorbates such as polysorbate 20, polysorbate, triton, tromethamine, lecithin, cholesterol, tyloxapal;
[0366] surfactants may be detergents, preferably with a molecular weight of >1.2 KD and/or a polyether, preferably with a molecular weight of >3 KD; non-limiting examples for preferred detergents are Tween 20, Tween 40, Tween 60, Tween 80 and Tween 85;
[0367] non-limiting examples for preferred polyethers are PEG 3000, PEG 3350, PEG 4000 and PEG 5000;
[0368] stability enhancing agents such as sucrose or sorbitol;
[0369] tonicity enhancing agents such as alkali metal halides, preferably sodium or potassium chloride, mannitol sorbitol;
[0370] parenteral delivery vehicles including sodium chloride solution, Ringer's dextrose, dextrose and sodium chloride, lactated Ringer's, or fixed oils;
[0371] intravenous delivery vehicles including fluid and nutrient replenishers, electrolyte replenishers (such as those based on Ringer's dextrose).

[0372] It is evident to those skilled in the art that the different constituents of the pharmaceutical composition (e.g., those listed above) can have different effects, for example, and amino acid can act as a buffer, a stabilizer and/or an antioxidant; mannitol can act as a bulking agent and/or a tonicity enhancing agent; sodium chloride can act as delivery vehicle and/or tonicity enhancing agent; etc.

[0373] It is envisaged that the composition of the invention might comprise, in addition to the polypeptide of the invention defined herein, further biologically active agents, depending on the intended use of the composition. Such agents might be drugs acting on the gastro-intestinal system, drugs acting as cytostatica, drugs preventing hyperurikemia, drugs inhibiting immunoreactions (e.g. corticosteroids), drugs modulating the inflammatory response, drugs acting on the circulatory system and/or agents such as cytokines known in the art. It is also envisaged that the antibody construct of the present invention is applied in a co-therapy, i.e., in combination with another anti-cancer medicament.

[0374] In certain embodiments, the optimal pharmaceutical composition will be determined by one skilled in the art depending upon, for example, the intended route of administration, delivery format and desired dosage. See, for example, REMINGTON'S PHARMACEUTICAL SCIENCES, supra. In certain embodiments, such compositions may influence the physical state, stability, rate of in vivo release and rate of in vivo clearance of the antibody construct of the invention. In certain embodiments, the primary vehicle or carrier in a pharmaceutical composition may be either aqueous or non-aqueous in nature. For example, a suitable vehicle or carrier may be water for injection, physiological saline solution or artificial cerebrospinal fluid, possibly supplemented with other materials common in compositions for parenteral administration. Neutral buffered saline or saline mixed with serum albumin are further exemplary vehicles. In certain embodiments, the antibody construct of the invention compositions may be prepared for storage by mixing the selected composition having the desired degree of purity with optional formulation agents (REMINGTON'S PHARMACEUTICAL SCIENCES, supra) in the form of a lyophilized cake or an aqueous solution. Further, in certain embodiments, the antibody construct of the invention may be formulated as a lyophilizate using appropriate excipients such as sucrose.

[0375] When parenteral administration is contemplated, the therapeutic compositions for use in this invention may be provided in the form of a pyrogen-free, parenterally acceptable aqueous solution comprising the desired antibody construct of the invention in a pharmaceutically acceptable vehicle. A particularly suitable vehicle for parenteral injection is sterile distilled water in which the antibody construct of the invention is formulated as a sterile, isotonic solution, properly preserved. In certain embodiments, the preparation can involve the formulation of the desired molecule with an agent, such as injectable microspheres, bio-erodible particles, polymeric compounds (such as polylactic acid or polyglycolic acid), beads or liposomes, that may provide controlled or sustained release of the product which can be delivered via depot injection. In certain embodiments, hyaluronic acid may also be used, having the effect of promoting sustained duration in the circulation. In certain embodiments, implantable drug delivery devices may be used to introduce the desired antibody construct.

[0376] Additional pharmaceutical compositions will be evident to those skilled in the art, including formulations involving the antibody construct of the invention in sustained- or controlled-delivery/release formulations. Techniques for formulating a variety of other sustained- or controlled-delivery means, such as liposome carriers, bio-erodible microparticles or porous beads and depot injections, are also known to those skilled in the art. See, for example, International Patent Application No. PCT/US93/00829, which describes controlled release of porous polymeric microparticles for delivery of pharmaceutical compositions. Sustained-release preparations may include semipermeable polymer matrices in the form of shaped articles, e.g., films, or microcapsules. Sustained release matrices may include polyesters, hydrogels, polylactides (as disclosed in U.S. Pat. No. 3,773,919 and European Patent Application Publication No. EP 058481), copolymers of L-glutamic acid and gamma ethyl-L-glutamate (Sidman et al., 1983, Biopolymers 2:547-556), poly (2-hydroxyethyl-methacrylate) (Langer et al., 1981, J. Biomed. Mater. Res. 15:167-277 and Langer, 1982, Chem. Tech. 12:98-105), ethylene vinyl acetate (Langer et al., 1981, supra) or poly-D(−)-3-hydroxybutyric acid (European Patent Application Publication No. EP 133,988). Sustained release compositions may also include liposomes that can be prepared by any of several methods known in the art. See, e.g., Eppstein et al., 1985, Proc. Natl. Acad. Sci. U.S.A. 82:3688-3692; European Patent Application Publication Nos. EP 036,676; EP 088,046 and EP 143,949.

[0377] The antibody construct may also be entrapped in microcapsules prepared, for example, by coacervation techniques or by interfacial polymerization (for example, hydroxymethylcellulose or gelatine-microcapsules and poly (methylmethacylate) microcapsules, respectively), in colloidal drug delivery systems (for example, liposomes, albumin microspheres, microemulsions, nanoparticles and nanocapsules), or in macroemulsions. Such techniques are disclosed in Remington's Pharmaceutical Sciences, 16th edition, Oslo, A., Ed., (1980).

[0378] Pharmaceutical compositions used for in vivo administration are typically provided as sterile preparations. Sterilization can be accomplished by filtration through sterile filtration membranes. When the composition is lyophilized, sterilization using this method may be conducted either prior to or following lyophilization and reconstitution. Compositions for parenteral administration can be stored in lyophilized form or in a solution. Parenteral compositions generally are placed into a container having a sterile access port, for example, an intravenous solution bag or vial having a stopper pierceable by a hypodermic injection needle.

[0379] Another aspect of the invention includes self-buffering antibody construct of the invention formulations, which can be used as pharmaceutical compositions, as described in international patent application WO 06138181A2 (PCT/US2006/022599). A variety of expositions are available on protein stabilization and formulation materials and methods useful in this regard, such as Arakawa et al., “Solvent interactions in pharmaceutical formulations,” Pharm Res. 8(3): 285-91 (1991); Kendrick et al., “Physical stabilization of proteins in aqueous solution” in: RATIONAL DESIGN OF STABLE PROTEIN FORMULATIONS: THEORY AND PRACTICE, Carpenter and Manning, eds. Pharmaceutical Biotechnology. 13: 61-84 (2002), and Randolph et al., “Surfactant-protein interactions”, Pharm Biotechnol. 13: 159-75 (2002), see particularly the parts pertinent to excipients and processes of the same for self-buffering protein formulations in accordance with the current invention, especially as to protein pharmaceutical products and processes for veterinary and/or human medical uses.

[0380] Salts may be used in accordance with certain embodiments of the invention to, for example, adjust the ionic strength and/or the isotonicity of a formulation and/or to improve the solubility and/or physical stability of a protein or other ingredient of a composition in accordance with the invention. As is well known, ions can stabilize the native state of proteins by binding to charged residues on the protein's surface and by shielding charged and polar groups in the protein and reducing the strength of their electrostatic interactions, attractive, and repulsive interactions. Ions also can stabilize the denatured state of a protein by binding to, in particular, the denatured peptide linkages (—CONH) of the protein. Furthermore, ionic interaction with charged and polar groups in a protein also can reduce intermolecular electrostatic interactions and, thereby, prevent or reduce protein aggregation and insolubility.

[0381] Ionic species differ significantly in their effects on proteins. A number of categorical rankings of ions and their effects on proteins have been developed that can be used in formulating pharmaceutical compositions in accordance with the invention. One example is the Hofmeister series, which ranks ionic and polar non-ionic solutes by their effect on the conformational stability of proteins in solution. Stabilizing solutes are referred to as “kosmotropic”. Destabilizing solutes are referred to as “chaotropic”. Kosmotropes commonly are used at high concentrations (e.g., >1 molar ammonium sulfate) to precipitate proteins from solution (“salting-out”). Chaotropes commonly are used to denture and/or to solubilize proteins (“salting-in”). The relative effectiveness of ions to “salt-in” and “salt-out” defines their position in the Hofmeister series.

[0382] Free amino acids can be used in the antibody construct of the invention formulations in accordance with various embodiments of the invention as bulking agents, stabilizers, and antioxidants, as well as other standard uses. Lysine, proline, serine, and alanine can be used for stabilizing proteins in a formulation. Glycine is useful in lyophilization to ensure correct cake structure and properties. Arginine may be useful to inhibit protein aggregation, in both liquid and lyophilized formulations. Methionine is useful as an antioxidant.

[0383] Polyols include sugars, e.g., mannitol, sucrose, and sorbitol and polyhydric alcohols such as, for instance, glycerol and propylene glycol, and, for purposes of discussion herein, polyethylene glycol (PEG) and related substances. Polyols are kosmotropic. They are useful stabilizing agents in both liquid and lyophilized formulations to protect proteins from physical and chemical degradation processes. Polyols also are useful for adjusting the tonicity of formulations. Among polyols useful in select embodiments of the invention is mannitol, commonly used to ensure structural stability of the cake in lyophilized formulations. It ensures structural stability to the cake. It is generally used with a lyoprotectant, e.g., sucrose. Sorbitol and sucrose are among preferred agents for adjusting tonicity and as stabilizers to protect against freeze-thaw stresses during transport or the preparation of bulks during the manufacturing process. Reducing sugars (which contain free aldehyde or ketone groups), such as glucose and lactose, can glycate surface lysine and arginine residues. Therefore, they generally are not among preferred polyols for use in accordance with the invention. In addition, sugars that form such reactive species, such as sucrose, which is hydrolyzed to fructose and glucose under acidic conditions, and consequently engenders glycation, also is not among preferred polyols of the invention in this regard. PEG is useful to stabilize proteins and as a cryoprotectant and can be used in the invention in this regard.

[0384] Embodiments of the antibody construct of the invention formulations further comprise surfactants. Protein molecules may be susceptible to adsorption on surfaces and to denaturation and consequent aggregation at air-liquid, solid-liquid, and liquid-liquid interfaces. These effects generally scale inversely with protein concentration. These deleterious interactions generally scale inversely with protein concentration and typically are exacerbated by physical agitation, such as that generated during the shipping and handling of a product. Surfactants routinely are used to prevent, minimize, or reduce surface adsorption. Useful surfactants in the invention in this regard include polysorbate 20, polysorbate 80, other fatty acid esters of sorbitan polyethoxylates, and poloxamer 188. Surfactants also are commonly used to control protein conformational stability. The use of surfactants in this regard is protein-specific since, any given surfactant typically will stabilize some proteins and destabilize others.

[0385] Polysorbates are susceptible to oxidative degradation and often, as supplied, contain sufficient quantities of peroxides to cause oxidation of protein residue side-chains, especially methionine. Consequently, polysorbates should be used carefully, and when used, should be employed at their lowest effective concentration. In this regard, polysorbates exemplify the general rule that excipients should be used in their lowest effective concentrations.

[0386] Embodiments of the antibody construct of the invention formulations further comprise one or more antioxidants. To some extent deleterious oxidation of proteins can be prevented in pharmaceutical formulations by maintaining proper levels of ambient oxygen and temperature and by avoiding exposure to light. Antioxidant excipients can be used as well to prevent oxidative degradation of proteins. Among useful antioxidants in this regard are reducing agents, oxygen/free-radical scavengers, and chelating agents. Antioxidants for use in therapeutic protein formulations in accordance with the invention preferably are water-soluble and maintain their activity throughout the shelf life of a product. EDTA is a preferred antioxidant in accordance with the invention in this regard. Antioxidants can damage proteins. For instance, reducing agents, such as glutathione in particular, can disrupt intramolecular disulfide linkages. Thus, antioxidants for use in the invention are selected to, among other things, eliminate or sufficiently reduce the possibility of themselves damaging proteins in the formulation.

[0387] Formulations in accordance with the invention may include metal ions that are protein co-factors and that are necessary to form protein coordination complexes, such as zinc necessary to form certain insulin suspensions. Metal ions also can inhibit some processes that degrade proteins. However, metal ions also catalyze physical and chemical processes that degrade proteins. Magnesium ions (10-120 mM) can be used to inhibit isomerization of aspartic acid to isoaspartic acid. Ca⁺² ions (up to 100 mM) can increase the stability of human deoxyribonuclease. Mg⁺², Mn⁺², and Zn⁺², however, can destabilize rhDNase. Similarly, Ca⁺² and Sr⁺² can stabilize Factor VIII, it can be destabilized by Mg⁺², Mn⁺² and Zn⁺², Cu⁺² and Fe⁺², and its aggregation can be increased by Al⁺³ ions.

[0388] Embodiments of the antibody construct of the invention formulations further comprise one or more preservatives. Preservatives are necessary when developing multi-dose parenteral formulations that involve more than one extraction from the same container. Their primary function is to inhibit microbial growth and ensure product sterility throughout the shelf-life or term of use of the drug product. Commonly used preservatives include benzyl alcohol, phenol and m-cresol. Although preservatives have a long history of use with small-molecule parenterals, the development of protein formulations that includes preservatives can be challenging. Preservatives almost always have a destabilizing effect (aggregation) on proteins, and this has become a major factor in limiting their use in multi-dose protein formulations. To date, most protein drugs have been formulated for single-use only. However, when multi-dose formulations are possible, they have the added advantage of enabling patient convenience, and increased marketability. A good example is that of human growth hormone (hGH) where the development of preserved formulations has led to commercialization of more convenient, multi-use injection pen presentations. At least four such pen devices containing preserved formulations of hGH are currently available on the market. Norditropin (liquid, Novo Nordisk), Nutropin AQ (liquid, Genentech) & Genotropin (lyophilized—dual chamber cartridge, Pharmacia & Upjohn) contain phenol while Somatrope (Eli Lilly) is formulated with m-cresol. Several aspects need to be considered during the formulation and development of preserved dosage forms. The effective preservative concentration in the drug product must be optimized. This requires testing a given preservative in the dosage form with concentration ranges that confer anti-microbial effectiveness without compromising protein stability.

[0389] As might be expected, development of liquid formulations containing preservatives are more challenging than lyophilized formulations. Freeze-dried products can be lyophilized without the preservative and reconstituted with a preservative containing diluent at the time of use. This shortens the time for which a preservative is in contact with the protein, significantly minimizing the associated stability risks. With liquid formulations, preservative effectiveness and stability should be maintained over the entire product shelf-life (about 18 to 24 months). An important point to note is that preservative effectiveness should be demonstrated in the final formulation containing the active drug and all excipient components.

[0390] The antibody constructs disclosed herein may also be formulated as immuno-liposomes. A “liposome” is a small vesicle composed of various types of lipids, phospholipids and/or surfactant which is useful for delivery of a drug to a mammal. The components of the liposome are commonly arranged in a bilayer formation, similar to the lipid arrangement of biological membranes. Liposomes containing the antibody construct are prepared by methods known in the art, such as described in Epstein et al., Proc. Natl. Acad. Sci. USA, 82: 3688 (1985); Hwang et al., Proc. Natl Acad. Sci. USA, 77: 4030 (1980); U.S. Pat. Nos. 4,485,045 and 4,544,545; and WO 97/38731. Liposomes with enhanced circulation time are disclosed in U.S. Pat. No. 5,013,556. Particularly useful liposomes can be generated by the reverse phase evaporation method with a lipid composition comprising phosphatidylcholine, cholesterol and PEG-derivatized phosphatidylethanolamine (PEG-PE). Liposomes are extruded through filters of defined pore size to yield liposomes with the desired diameter. Fab′ fragments of the antibody construct of the present invention can be conjugated to the liposomes as described in Martin et al. J. Biol. Chem. 257: 286-288 (1982) via a disulfide interchange reaction. A chemotherapeutic agent is optionally contained within the liposome. See Gabizon et al. J. National Cancer Inst. 81 (19) 1484 (1989).

[0391] Once the pharmaceutical composition has been formulated, it may be stored in sterile vials as a solution, suspension, gel, emulsion, solid, crystal, or as a dehydrated or lyophilized powder. Such formulations may be stored either in a ready-to-use form or in a form (e.g., lyophilized) that is reconstituted prior to administration.

[0392] The biological activity of the pharmaceutical composition defined herein can be determined for instance by cytotoxicity assays, as described in the following examples, in WO 99/54440 or by Schlereth et al. (Cancer Immunol. Immunother. 20 (2005), 1-12). “Efficacy” or “in vivo efficacy” as used herein refers to the response to therapy by the pharmaceutical composition of the invention, using e.g. standardized NCI response criteria. The success or in vivo efficacy of the therapy using a pharmaceutical composition of the invention refers to the effectiveness of the composition for its intended purpose, i.e. the ability of the composition to cause its desired effect, i.e. depletion of pathologic cells, e.g. tumor cells. The in vivo efficacy may be monitored by established standard methods for the respective disease entities including, but not limited to white blood cell counts, differentials, Fluorescence Activated Cell Sorting, bone marrow aspiration. In addition, various disease specific clinical chemistry parameters and other established standard methods may be used. Furthermore, computer-aided tomography, X-ray, nuclear magnetic resonance tomography (e.g. for National Cancer Institute-criteria based response assessment [Cheson B D, Horning S J, Coiffier B, Shipp M A, Fisher R I, Connors J M, Lister T A, Vose J, Grillo-Lopez A, Hagenbeek A, Cabanillas F, Klippensten D, Hiddemann W, Castellino R, Harris N L, Armitage J O, Carter W, Hoppe R, Canellos G P. Report of an international workshop to standardize response criteria for non-Hodgkin's lymphomas. NCI Sponsored International Working Group. J Clin Oncol. 1999 April; 17(4):1244]), positron-emission tomography scanning, white blood cell counts, differentials, Fluorescence Activated Cell Sorting, bone marrow aspiration, lymph node biopsies/histologies, and various lymphoma specific clinical chemistry parameters (e.g. lactate dehydrogenase) and other established standard methods may be used.

[0393] Another major challenge in the development of drugs such as the pharmaceutical composition of the invention is the predictable modulation of pharmacokinetic properties. To this end, a pharmacokinetic profile of the drug candidate, i.e. a profile of the pharmacokinetic parameters that affect the ability of a particular drug to treat a given condition, can be established. Pharmacokinetic parameters of the drug influencing the ability of a drug for treating a certain disease entity include, but are not limited to: half-life, volume of distribution, hepatic first-pass metabolism and the degree of blood serum binding. The efficacy of a given drug agent can be influenced by each of the parameters mentioned above.

[0394] “Half-life” means the time where 50% of an administered drug are eliminated through biological processes, e.g. metabolism, excretion, etc. By “hepatic first-pass metabolism” is meant the propensity of a drug to be metabolized upon first contact with the liver, i.e. during its first pass through the liver. “Volume of distribution” means the degree of retention of a drug throughout the various compartments of the body, like e.g. intracellular and extracellular spaces, tissues and organs, etc. and the distribution of the drug within these compartments. “Degree of blood serum binding” means the propensity of a drug to interact with and bind to blood serum proteins, such as albumin, leading to a reduction or loss of biological activity of the drug.

[0395] Pharmacokinetic parameters also include bioavailability, lag time (Tlag), Tmax, absorption rates, more onset and/or Cmax for a given amount of drug administered. “Bioavailability” means the amount of a drug in the blood compartment. “Lag time” means the time delay between the administration of the drug and its detection and measurability in blood or plasma. “Tmax” is the time after which maximal blood concentration of the drug is reached, and “Cmax” is the blood concentration maximally obtained with a given drug. The time to reach a blood or tissue concentration of the drug which is required for its biological effect is influenced by all parameters. Pharmacokinetic parameters of bispecific antibody constructs exhibiting cross-species specificity, which may be determined in preclinical animal testing in non-chimpanzee primates as outlined above, are also set forth e.g. in the publication by Schlereth et al. (Cancer Immunol. Immunother. 20 (2005), 1-12).

[0396] One embodiment provides the antibody construct of the invention or the antibody construct produced according to the process of the invention for use in the prevention, treatment or amelioration of a hematological cancer disease or a metastatic cancer disease.

[0397] The formulations described herein are useful as pharmaceutical compositions in the treatment, amelioration and/or prevention of the pathological medical condition as described herein in a patient in need thereof. The term “treatment” refers to both therapeutic treatment and prophylactic or preventative measures. Treatment includes the application or administration of the formulation to the body, an isolated tissue, or cell from a patient who has a disease/disorder, a symptom of a disease/disorder, or a predisposition toward a disease/disorder, with the purpose to cure, heal, alleviate, relieve, alter, remedy, ameliorate, improve, or affect the disease, the symptom of the disease, or the predisposition toward the disease.

[0398] The term “amelioration” as used herein refers to any improvement of the disease state of a patient having a tumor or cancer or a metastatic cancer as specified herein below, by the administration of an antibody construct according to the invention to a subject in need thereof. Such an improvement may also be seen as a slowing or stopping of the p progression of the tumor or cancer or metastatic cancer of the patient. The term “prevention” as used herein means the avoidance of the occurrence or re-occurrence of a patient having a tumor or cancer or a metastatic cancer as specified herein below, by the administration of an antibody construct according to the invention to a subject in need thereof.

[0399] The term “disease” refers to any condition that would benefit from treatment with the antibody construct or the pharmaceutic composition described herein. This includes chronic and acute disorders or diseases including those pathological conditions that predispose the mammal to the disease in question.

[0400] A “neoplasm” is is an abnormal growth of tissue, usually but not always forming a mass. When also forming a mass, it is commonly referred to as a “tumor”. Neoplasms or tumors or can be benign, potentially malignant (pre-cancerous), or malignant. Malignant neoplasms are commonly called cancer. They usually invade and destroy the surrounding tissue and may form metastases, i.e., they spread to other parts, tissues or organs of the body. Hence, the term “metatstatic cancer” encompasses metastases to other tissues or organs than the one of the original tumor. Lymphomas and leukemias are lymphoid neoplasms. For the purposes of the present invention, they are also encompassed by the terms “tumor” or “cancer”.

[0401] In a preferred embodiment of the invention, the hematological cancer disease is AML and the metastatic cancer disease can be derived from of the foregoing.

[0402] Preferred tumor or cancer diseases in conncetion with this invention are selected from a group consisting of breast cancer, Carcinoid, cervical cancer, colorectal cancer, endometrial cancer, gastric cancer, head and neck cancer, mesothelioma, liver cancer, lung cancer, ovarian cancer, pancreatic cancer, prostate cancer, skin cancer, renal cancer and stomach cancer. More preferably, the tumor or cancer disease, which is preferably a solid tumor disease, can be selected from the group consisting of ovarian cancer, pancreatic cancer, mesothelioma, lung cancer, gastric cancer and triple negative breast cancer. The metastatic cancer disease can be derived from any of the foregoing.

[0403] The invention also provides a method for the treatment or amelioration a hematological cancer disease or a metastatic cancer disease, comprising the step of administering to a subject in need thereof the antibody construct of the invention or the antibody construct produced according to the process of the invention.

[0404] The terms “subject in need” or those “in need of treatment” includes those already with the disorder, as well as those in which the disorder is to be prevented. The subject in need or “patient” includes human and other mammalian subjects that receive either prophylactic or therapeutic treatment.

[0405] The antibody construct of the invention will generally be designed for specific routes and methods of administration, for specific dosages and frequencies of administration, for specific treatments of specific diseases, with ranges of bio-availability and persistence, among other things. The materials of the composition are preferably formulated in concentrations that are acceptable for the site of administration.

[0406] Formulations and compositions thus may be designed in accordance with the invention for delivery by any suitable route of administration. In the context of the present invention, the routes of administration include, but are not limited to
[0407] topical routes (such as epicutaneous, inhalational, nasal, opthalmic, auricular/aural, vaginal, mucosal);
[0408] enteral routes (such as oral, gastrointestinal, sublingual, sublabial, buccal, rectal); and
[0409] parenteral routes (such as intravenous, intraarterial, intraosseous, intramuscular, intracerebral, intracerebroventricular, epidural, intrathecal, subcutaneous, intraperitoneal, extra-amniotic, intraarticular, intracardiac, intradermal, intralesional, intrauterine, intravesical, intravitreal, transdermal, intranasal, transmucosal, intrasynovial, intraluminal).

[0410] The pharmaceutical compositions and the antibody construct of this invention are particularly useful for parenteral administration, e.g., subcutaneous or intravenous delivery, for example by injection such as bolus injection, or by infusion such as continuous infusion. Pharmaceutical compositions may be administered using a medical device. Examples of medical devices for administering pharmaceutical compositions are described in U.S. Pat. Nos. 4,475,196; 4,439,196; 4,447,224; 4,447, 233; 4,486,194; 4,487,603; 4,596,556; 4,790,824; 4,941,880; 5,064,413; 5,312,335; 5,312,335; 5,383,851; and 5,399,163.

[0411] In particular, the present invention provides for an uninterrupted administration of the suitable composition. As a non-limiting example, uninterrupted or substantially uninterrupted, i.e. continuous administration may be realized by a small pump system worn by the patient for metering the influx of therapeutic agent into the body of the patient. The pharmaceutical composition comprising the antibody construct of the invention can be administered by using said pump systems. Such pump systems are generally known in the art, and commonly rely on periodic exchange of cartridges containing the therapeutic agent to be infused. When exchanging the cartridge in such a pump system, a temporary interruption of the otherwise uninterrupted flow of therapeutic agent into the body of the patient may ensue. In such a case, the phase of administration prior to cartridge replacement and the phase of administration following cartridge replacement would still be considered within the meaning of the pharmaceutical means and methods of the invention together make up one “uninterrupted administration” of such therapeutic agent.

[0412] The continuous or uninterrupted administration of the antibody constructs of the invention may be intravenous or subcutaneous by way of a fluid delivery device or small pump system including a fluid driving mechanism for driving fluid out of a reservoir and an actuating mechanism for actuating the driving mechanism. Pump systems for subcutaneous administration may include a needle or a cannula for penetrating the skin of a patient and delivering the suitable composition into the patient's body. Said pump systems may be directly fixed or attached to the skin of the patient independently of a vein, artery or blood vessel, thereby allowing a direct contact between the pump system and the skin of the patient. The pump system can be attached to the skin of the patient for 24 hours up to several days. The pump system may be of small size with a reservoir for small volumes. As a non-limiting example, the volume of the reservoir for the suitable pharmaceutical composition to be administered can be between 0.1 and 50 ml.

[0413] The continuous administration may also be transdermal by way of a patch worn on the skin and replaced at intervals. One of skill in the art is aware of patch systems for drug delivery suitable for this purpose. It is of note that transdermal administration is especially amenable to uninterrupted administration, as exchange of a first exhausted patch can advantageously be accomplished simultaneously with the placement of a new, second patch, for example on the surface of the skin immediately adjacent to the first exhausted patch and immediately prior to removal of the first exhausted patch. Issues of flow interruption or power cell failure do not arise.

[0414] If the pharmaceutical composition has been lyophilized, the lyophilized material is first reconstituted in an appropriate liquid prior to administration. The lyophilized material may be reconstituted in, e.g., bacteriostatic water for injection (BWFI), physiological saline, phosphate buffered saline (PBS), or the same formulation the protein had been in prior to lyophilization.

[0415] The compositions of the present invention can be administered to the subject at a suitable dose which can be determined e.g. by dose escalating studies by administration of increasing doses of the antibody construct of the invention exhibiting cross-species specificity described herein to non-chimpanzee primates, for instance macaques. As set forth above, the antibody construct of the invention exhibiting cross-species specificity described herein can be advantageously used in identical form in preclinical testing in non-chimpanzee primates and as drug in humans. The dosage regimen will be determined by the attending physician and clinical factors. As is well known in the medical arts, dosages for any one patient depend upon many factors, including the patient's size, body surface area, age, the particular compound to be administered, sex, time and route of administration, general health, and other drugs being administered concurrently.

[0416] The term “effective dose” or “effective dosage” is defined as an amount sufficient to achieve or at least partially achieve the desired effect. The term “therapeutically effective dose” is defined as an amount sufficient to cure or at least partially arrest the disease and its complications in a patient already suffering from the disease. Amounts or doses effective for this use will depend on the condition to be treated (the indication), the delivered antibody construct, the therapeutic context and objectives, the severity of the disease, prior therapy, the patient's clinical history and response to the therapeutic agent, the route of administration, the size (body weight, body surface or organ size) and/or condition (the age and general health) of the patient, and the general state of the patient's own immune system. The proper dose can be adjusted according to the judgment of the attending physician such that it can be administered to the patient once or over a series of administrations, and in order to obtain the optimal therapeutic effect.

[0417] A typical dosage may range from about 0.1 μg/kg to up to about 30 mg/kg or more, depending on the factors mentioned above. In specific embodiments, the dosage may range from 1.0 μg/kg up to about 20 mg/kg, optionally from 10 μg/kg up to about 10 mg/kg or from 100 μg/kg up to about 5 mg/kg.

[0418] A therapeutic effective amount of an antibody construct of the invention preferably results in a decrease in severity of disease symptoms, an increase in frequency or duration of disease symptom-free periods or a prevention of impairment or disability due to the disease affliction. For treating FLT3-expressing tumors, a therapeutically effective amount of the antibody construct of the invention, e.g. an anti-FLT3/anti-CD3 antibody construct, preferably inhibits cell growth or tumor growth by at least about 20%, at least about 40%, at least about 50%, at least about 60%, at least about 70%, at least about 80%, or at least about 90% relative to untreated patients. The ability of a compound to inhibit tumor growth may be evaluated in an animal model predictive of efficacy in human tumors.

[0419] The pharmaceutical composition can be administered as a sole therapeutic or in combination with additional therapies such as anti-cancer therapies as needed, e.g. other proteinaceous and non-proteinaceous drugs. These drugs may be administered simultaneously with the composition comprising the antibody construct of the invention as defined herein or separately before or after administration of said antibody construct in timely defined intervals and doses.

[0420] The term “effective and non-toxic dose” as used herein refers to a tolerable dose of an inventive antibody construct which is high enough to cause depletion of pathologic cells, tumor elimination, tumor shrinkage or stabilization of disease without or essentially without major toxic effects. Such effective and non-toxic doses may be determined e.g. by dose escalation studies described in the art and should be below the dose inducing severe adverse side events (dose limiting toxicity, DLT).

[0421] The term “toxicity” as used herein refers to the toxic effects of a drug manifested in adverse events or severe adverse events. These side events might refer to a lack of tolerability of the drug in general and/or a lack of local tolerance after administration. Toxicity could also include teratogenic or carcinogenic effects caused by the drug.

[0422] The term “safety”, “in vivo safety” or “tolerability” as used herein defines the administration of a drug without inducing severe adverse events directly after administration (local tolerance) and during a longer period of application of the drug. “Safety”, “in vivo safety” or “tolerability” can be evaluated e.g. at regular intervals during the treatment and follow-up period. Measurements include clinical evaluation, e.g. organ manifestations, and screening of laboratory abnormalities. Clinical evaluation may be carried out and deviations to normal findings recorded/coded according to NCI-CTC and/or MedDRA standards. Organ manifestations may include criteria such as allergy/immunology, blood/bone marrow, cardiac arrhythmia, coagulation and the like, as set forth e.g. in the Common Terminology Criteria for adverse events v3.0 (CTCAE). Laboratory parameters which may be tested include for instance hematology, clinical chemistry, coagulation profile and urine analysis and examination of other body fluids such as serum, plasma, lymphoid or spinal fluid, liquor and the like. Safety can thus be assessed e.g. by physical examination, imaging techniques (i.e. ultrasound, x-ray, CT scans, Magnetic Resonance Imaging (MRI), other measures with technical devices (i.e. electrocardiogram), vital signs, by measuring laboratory parameters and recording adverse events. For example, adverse events in non-chimpanzee primates in the uses and methods according to the invention may be examined by histopathological and/or histochemical methods.

[0423] The above terms are also referred to e.g. in the Preclinical safety evaluation of biotechnology-derived pharmaceuticals S6; ICH Harmonised Tripartite Guideline; ICH Steering Committee meeting on Jul. 16, 1997.

[0424] In a further embodiment, the invention provides a kit comprising an antibody construct of the invention, an antibody construct produced according to the process of the invention, a polynucleotide of the invention, a vector of the invention, and/or a host cell of the invention.

[0425] In the context of the present invention, the term “kit” means two or more components—one of which corresponding to the antibody construct, the pharmaceutical composition, the vector or the host cell of the invention—packaged together in a container, recipient or otherwise. A kit can hence be described as a set of products and/or utensils that are sufficient to achieve a certain goal, which can be marketed as a single unit.

[0426] The kit may comprise one or more recipients (such as vials, ampoules, containers, syringes, bottles, bags) of any appropriate shape, size and material (preferably waterproof, e.g. plastic or glass) containing the antibody construct or the pharmaceutical composition of the present invention in an appropriate dosage for administration (see above). The kit may additionally contain directions for use (e.g. in the form of a leaflet or instruction manual), means for administering the antibody construct of the present invention such as a syringe, pump, infuser or the like, means for reconstituting the antibody construct of the invention and/or means for diluting the antibody construct of the invention.

[0427] The invention also provides kits for a single-dose administration unit. The kit of the invention may also contain a first recipient comprising a dried/lyophilized antibody construct and a second recipient comprising an aqueous formulation. In certain embodiments of this invention, kits containing single-chambered and multi-chambered pre-filled syringes (e.g., liquid syringes and lyosyringes) are provided.

[0428] The Figures show:

[0429] FIGS. 1A and 1B:

(a) Schematic Structure of the monomeric FLT3 protein and (b) crystal structure of the FLT3 homodimer interacting with FLT3LG homodimer.

[0430] FIG. 2:

Schematic Structure of chimeric Human/Mouse FLT3 molecules used for the epitope cluster binder characterization

[0431] FIGS. 3A and 3B:

Schematic Structure of the truncated FLT3 constructs used for epitope cluster binder characterization

[0432] FIG. 4:

Assay to analyze the competition of FLT3 binder of the invention with FLT3-ligand for FLT3 binding.

[0433] CHO-human FLT3 cells were incubated with or w/o 10 μg/ml FLT3 Ligand for 30 min (no washing step). scFv periplasmic preps were added and incubated for 30 min. The detection was performed using mouse anti-FLAG+PE-conjugated goat anti-mouse and the Fluorescence median detected by FACS (median (+ligand)/median (w/o ligand)*100%)

[0434] FIG. 5:

FACS binding analysis of designated cross-species specific bispecific single chain constructs to CHO cells transfected with the human FLT3, human CD3+ T cell line HPBaLL, CHO cells transfected with cynomolgus FLT3 and a macaque CD3+ T cell line LnPx 4119. The red line represents cells incubated with 2 μg/ml purified monomeric protein that are subsequently incubated with the mouse anti-I2C antibody and the PE labelled goat anti mouse IgG detection antibody. The black histogram line reflects the negative control: cells only incubated with the anti-I2C antibody as well as the PE labelled detection antibody (see example 6).

[0435] FIG. 6:

Cytotoxic activity induced by designated cross-species specific single chain constructs redirected to CD56 depleted unstimulated human PBMCs as effector cells and CHO cells transfected with human FLT3 as target cells. (Example 9)

[0436] FIGS. 7A and 7B:

Cross-reactive binding to CD3, FLT3 and its isoforms). 5 μg/ml BiTE protein: 4° C. 60 min; 2 μg/ml anti-I2C-Ab 3E5.A5: 4° C. 30 min; goat anti-mouse-PE 1:100: 4° C. 30 min

[0437] FIGS. 8A and 8B:

Non-Binding to ParAlogs and Untransfected CHO. 5 μg/ml BiTE protein: 4° C. 60 min; 2 μg/ml anti-I2C-Ab 3E5.A5: 4° C. 30 min; goat anti-mouse-PE 1:100: 4° C. 30 min

[0438] FIG. 9:

Epitope clusters mapping—Cluster E1

[0439] FIG. 10:

FLT3 scFc antibody constructs are active using unstimulated human PBMC against human FLT3-transfected CHO cells in absence and presence of FLT3LG (FLT3 ligand)

### EXAMPLES

[0440] The following examples illustrate the invention. These examples should not be construed as to limit the scope of this invention. The present invention is limited only by the claims.

### Example 1

### Generation of CHO Cells Expressing Wild Type and Chimeric FLT3

[0441] The FLT3 antigen can be subdivided into six different sub-domains or regions that are defined, for the purposes of Examples 1 and 2. The aa sequence of those five sub-domains is depicted in SEQ ID NOs: 814-818.

[0442] The following molecules were generated; see also FIG. 1:

| | |
|---|---|
| hu lsp V5xFlt3-E1muxEpC-pEFDHFR | SEQ ID NO: 827 |
| hu lsp V5xFlt3-E2muxEpC-pEFDHFR | SEQ ID NO: 828 |
| hu lsp V5xFlt3-E3muxEpC-pEFDHFR | SEQ ID NO: 829 |
| hu lsp V5xFlt3-E3AmuxEpC-pEFDHFR | SEQ ID NO: 830 |
| hu lsp V5xFlt3-E3BmuxEpC-pEFDHFR | SEQ ID NO: 831 |
| hu lsp V5xFlt3-E4muxEpC-pEFDHFR | SEQ ID NO: 832 |
| hu lsp V5xFlt3-E5muxEpC-pEFDHFR | SEQ ID NO: 833 |
| hu lsp V5xFlt3-E6muxEpC-pEFDHFR | SEQ ID NO: 834 |
| hu lsp FLT3-full murine EDC | |
| hu lsp FLT3-full human EDC | |
| full length human FLT3 | SEQ ID NO: 801 |
| full length cyno FLT3 | SEQ ID NO: 802 |

[0443] For the generation of CHO/HEK cells expressing human, murine and chimeric FLT3 ExtraCellulrDomain (ECD), the respective coding sequences for human FLT3, murine FLT3 and the eight cimeric human/murine FLT3 versions (see above) were cloned into a plasmid designated pEF-DHFR (pEF-DHFR is described in Raum et al. Cancer Immunol Immunother 50 (2001) 141-150). For cell surface expression of human and murine FLT3 the original signal peptide was used. All cloning procedures were carried out according to standard protocols (Sambrook, Molecular Cloning; A Laboratory Manual, 3rd edition, Cold Spring Harbour Laboratory Press, Cold Spring Harbour, New York (2001)). For each construct, a corresponding plasmid was transfected into DHFR deficient CHO cells for eukaryotic expression, as described by Kaufman R. J. (1990) Methods Enzymol. 185, 537-566.

[0444] The expression of human, chimeric and murine FLT3 on CHO cells was verified in a FACS assay.

### Example 2

### Epitope Mapping of Anti-FLT3 Antibody Constructs

[0445] Cells transfected with human, murine FLT3 and with the chimeric human FLT3 molecules (see Example 1) were stained with crude, undiluted periplasmic extract containing bispecific FLT3×CD3 antibody constructs (with the CD3 binding domain being denominated I2C) fused to a human albumin (variant 1), in PBS/1.5% FCS. Bound molecules were detected with an in-house mouse monoclonal anti-CD3 binding domain antibody (50 μl) followed by an anti-mouse IgG Fc-gamma-PE (1:100, 50 μl; Jackson Immunoresearch #115-116-071) All antibodies were diluted in PBS/1.5% FCS. As negative control, cells were incubated with PBS/2% FCS instead of the periplasmic extract. The samples were measured by flow cytometry.

[0446] The regions that were recognized by the respective FLT3 binding domains are indicated in the sequence table (Table 2). Loss of the FACS signal in the respective chimeric FLT3 constructs comprising the murine epitope cluster was the read out for the relevance of the respective cluster for the binding. The respective results in table 2 are in line with the results according to example 3.

### Example 3

### Generation of CHO Cells Expressing Wild Type and Truncated FLT3

[0447] The extracellular domain of the FLT3 antigen can be subdivided into different sub-domains or regions, respectively epitope cluster E1 to E6 that are defined, by the following amino acid positions:

| | | | |
|---|---|---|---|
| E1 | | aa 27-79 | SEQ ID NO: 819 |
| E2 | D1 | aa 79-167 | SEQ ID NO: 820 |
| E3 | D2 | aa 168-244 | SEQ ID NO: 821 |
| E3A | D2A | aa 168-206 | SEQ ID NO: 822 |
| E3B | D2B | aa 207-244 | SEQ ID NO: 823 |
| E4 | D3 | aa 245-345 | SEQ ID NO: 824 |
| E5 | D4 | aa 346-434 | SEQ ID NO: 825 |
| E6 | D5 | aa 435-543 | SEQ ID NO: 826 |

[0448] For the construction of the truncated FLT3 molecules used for epitope mapping (see FIGS. 3A-3C), the sequences of the respective seven human regions as well as the five combinations of two neighboring human regions (see above) were replaced with the corresponding regions from murine FLT3. Furthermore, a V5 tag (GKPIPNPLLGLDST) was fused via a “GGGGS” linker to the C-terminus of the chimeric molecules. The final chimeric molecule sequences are depicted in SEQ ID NOs: 827-834. In addition, full length human FLT3 (SEQ ID NO: 801) and full-length cyno FLT3 (SEQ ID NO: 802) were constructed, both having a V5 tag (GKPIPNPLLGLDST) fused via a “GGGGS” linker to their C-terminus.

[0449] For the generation of CHO dhfr− cells expressing the above constructs, the respective coding sequences were cloned into a plasmid designated pEF-DHFR (pEF-DHFR is described in Raum et al. Cancer Immunol Immunother 50 (2001) 141-150). CHO cells transfected with human FLT3, but without the V5 tag, were also generated. All cloning procedures were carried out according to standard protocols (Sambrook, Molecular Cloning; A Laboratory Manual, 3rd edition, Cold Spring Harbour Laboratory Press, Cold Spring Harbour, New York (2001)). For each construct, a corresponding plasmid was transfected into DHFR deficient CHO cells for eukaryotic expression, as described by Kaufman R. J. (1990) Methods Enzymol. 185, 537-566.

[0450] The expression of the constructs on the CHO cells was verified using a monoclonal mouse IgG2a anti-v5 tag antibody (1 μg/ml; AbD Serotec, # MCA 1360). Bound monoclonal antibody was detected with an anti-mouse IgG Fc-gamma-PE. As negative control, cells were incubated with isotype control antibody instead of the first antibody. The samples were measured by flow cytometry.

[0451] The results of this analysis are shown for the disclosed FLT3 binder in Table 2. Those results are in line with the epitope mapping analysis according to example 2

TABLE 2
Mapping of the epitope

| Epitope | |
|---|---|
| cluster | Binder |
| FL-1 | E1 |
| FL-2 | E1 |
| FL-3 | E1 |
| FL-4 | E1 |
| FL-5 | E1 |
| FL-6 | E1 |
| FL-7 | E1 |
| FL-8 | E1 |
| FL-9 | E1 |
| FL-10 | E1 |
| FL-11 | E1 |
| FL-12 | E1 |
| FL-13 | E1 |
| FL-14 | E1 |
| FL-15 | E1 |
| FL-16 | E1 |
| FL-17 | E1 |
| FL-18 | E1 |
| FL-19 | E1 |
| FL-20 | E1 |
| FL-21 | E1 |
| FL-22 | E1 |
| FL-23 | E1 |
| FL-24 | E1 |
| FL-25 | E1 |
| FL-26 | E1 |
| FL-27 | E1 |
| FL-28 | E1 |
| FL-29 | E1 |
| FL-30 | E1 |
| FL-31 | E1 |
| FL-32 | E1 |
| FL-33 | E1 |
| FL-34 | E1 |
| FL-35 | E1 |
| FL-36 | E1 |
| FL-37 | E1 |
| FL-38 | E1 |
| FL-39 | E1 |
| FL-40 | E1 |
| FL-41 | E1 |
| FL-42 | E1 |
| FL-43 | E1 |
| FL-44 | E1 |
| FL-45 | E1 |
| FL-46 | E1 |
| FL-47 | E1 |
| FL-48 | E1 |
| FL-49 | E1 |
| FL-50 | E1 |
| FL-51 | E1 |
| FL-52 | E1 |
| FL-53 | E3 |
| FL-54 | E3 |
| FL-55 | E1 |
| FL-56 | E1 |
| FL-57 | E1 |
| FL-58 | E1 |
| FL-59 | E1 |
| FL-60 | E1 |
| FL-61 | E3 |
| FL-62 | E3 |
| FL-63 | E3 |
| FL-64 | E3 |
| FL-65 | E1 |

### Example 4

### Biacore-Based Determination of Antibody Affinity to Human and Cynomolgus FLT3

[0452] Biacore analysis experiments were performed using recombinant human/cyno FLT3-ECD fusion proteins with albumin to determine target binding of the antibody constructs of the invention.

[0453] In detail, CM5 Sensor Chips (GE Healthcare) were immobilized with approximately 600-800 RU of the respective recombinant antigen using acetate buffer pH 4.5 according to the manufacturer's manual. The FLT3×CD3 bispecific antibody construct samples were loaded in a dilution series of the following concentrations: 50 nM, 25 nM, 12.5 nM, 6.25 nM and 3.13 nM diluted in HBS-EP running buffer (GE Healthcare). Flow rate was 30 μl/min for 3 min, then HBS-EP running buffer was applied for 8 min to 20 min again at a flow rate of 30 μl/ml. Regeneration of the chip was performed using 10 mM glycine 10 mM NaCl pH 1.5 solution. Data sets were analyzed using BiaEval Software. In general two independent experiments were performed.

[0454] Furthermore, the binding of the bispecific antibody constructs to human CD3 and macaque CD3 was confirmed in a Biacore assay.

### Example 5

### Scatchard-Based Analysis of FLT3×CD3 Bispecific Antibody Construct Affinity to Human and Macaque FLT3 on Target Antigen Positive Cells and Determination of the Interspecies Affinity Gap

[0455] The affinities of FLT3×CD3 bispecific antibody constructs to CHO cells transfected with human or macaque FLT3 were also determined by Scatchard analysis as the most reliable method for measuring potential affinity gaps between human and macaque FLT3. For the Scatchard analysis, saturation binding experiments are performed using a monovalent detection system to precisely determine monovalent binding of the FLT3×CD3 bispecific antibody constructs to the respective cell line.

[0456] 2×10⁴ cells of the respective cell line (recombinantly human FLT3-expressing CHO cell line, recombinantly macaque FLT3-expressing CHO cell line) were incubated each with 50 μl of a triplet dilution series (twelve dilutions at 1:2) of the respective FLT3×CD3 bispecific antibody construct (until saturation is reached) starting at 10-20 nM followed by 16 h incubation at 4° C. under agitation and one residual washing step. Then, the cells were incubated for another hour with 30 μl of a CD3×ALEXA488 conjugate solution. After one washing step, the cells were resuspended in 150 μl FACS buffer containing 3.5%, formaldehyde, incubated for further 15 min, centrifuged, resuspended in FACS buffer and analyzed using a FACS Cantoll machine and FACS Diva software. Data were generated from two independent sets of experiments, each using triplicates. Respective Scatchard analysis was calculated to extrapolate maximal binding (Bmax). The concentrations of FLT3×CD3 bispecific antibody constructs at half-maximal binding were determined reflecting the respective KDs. Values of triplicate measurements were plotted as hyperbolic curves and as S-shaped curves to demonstrate proper concentration ranges from minimal to optimal binding.

### Example 6

### Bispecific Binding and Interspecies Cross-Reactivity

[0457] For confirmation of binding to human FLT3 and CD3 and to cyno FLT3 and CD3, bispecific antibody constructs of the invention were tested by flow cytometry using
[0458] CHO cells transfected with human FLT3 (SEQ ID NO: 801), with human FLT3 isoforms (Human FLT3 (T227M) isoform see SEQ ID NO: 803 and Human FLT3-ITD isoform see SEQ ID NO:804), and with macaque FLT3 (SEQ ID NO: 802), respectively,
[0459] the FLT3 positive human AML cell lines EOL-1, MOLM-13 and MV4-11 (but other FLT3 positive human cell lines are also conceivable)
[0460] CD3-expressing human T cell leukemia cell line HPB-all (DSMZ, Braunschweig, ACC483), and
[0461] the cynomolgus CD3-expressing T cell line LnPx 4119

[0462] For flow cytometry 200,000 cells of the respective cell lines were incubated for 60 min at 4° C. with 50 μl of purified bispecific antibody construct at a concentration of 5 μg/ml. The cells were washed twice in PBS/2%, FCS and then incubated with an in-house mouse antibody (2 μg/ml) specific for the CD3 binding part of the bispecific antibody constructs for 30 min at 4° C. After washing, bound mouse antibodies were detected with a goat anti-mouse Fcγ-PE (1:100) for 30 min at 4° C. Samples were measured by flow cytometry. Non-transfected CHO cells were used as negative control.

TABLE 3a
Affinities of FLT3 binding domains:

| | | | | Affinity |
|---|---|---|---|---|
| | | Octet based | Octet based | gap |
| | | affinity | affinity | KDmac/ |
| | Epitope | hu FLT3* | mac FLT3* | KDhu |
| FLT3-HLE BiTE | cluster | [nM] | [nM] | FLT3 |
| FL 39 × I2C-scFc^{⊙} | E1 | 0.52 ± 0.03 | 1.65 ± 0.10 | 3.2 |
| FL 16 × I2C-scFc | E1 | 0.57** | 1.38** | 2.4 |
| FL 42 × I2C-scFc | E1 | 0.36 ± 0.11 | 1.11 ± 0.13 | 3.1 |
| FL 36 × I2C-scFc | E1 | 5.30 ± 0.08 | 4.44 ± 0.72 | 0.8 |
| FL 52 × I2C-scFc | E1 | 4.80 ± 0.25 | 4.14 ± 0.08 | 0.9 |
| FL 23 × I2C-scFc | E1 | 0.97 ± 0.19 | 0.68 ± 0.01 | 0.7 |
| FL 46 × I2C-scFc | E1 | 1.67 ± 0.08 | 7.9 ± 1.81 | 4.7 |
| FL 61 × I2C-scFc | E3 | 26.50 ± 0.57 | 3.77 ± 3.74 | 0.14 |

TABLE 3b
Affinities of CD3 binding domains:

| | | | | Affinity |
|---|---|---|---|---|
| | | Biacore | Biacore | gap |
| | | based affinity | based affinity | KDmac/ |
| | Epitope | hu FLT3* | mac FLT3* | KDhu |
| FLT3-HLE BiTE | cluster | [nM] | [nM] | FLT3 |
| FL 39 × I2C-scFc^{⊙} | E1 | 8.24 ± 0.15 | 6.84 ± 0.09 | 0.8 |
| FL 16 × I2C-scFc | E1 | 6.08 ± 0.12 | 4.91 ± 0.10 | 0.8 |
| FL 42 × I2C-scFc | E1 | 9.13 ± 1.03 | 7.31 ± 1.13 | 0.8 |
| FL 36 × I2C-scFc | E1 | 7.73 ± 014 | 6.06 ± 0.42 | 0.8 |
| FL 52 × I2C-scFc | E1 | 7.40 ± 0.80 | 5.99 ± 0.78 | 0.8 |
| FL 23 × I2C-scFc | E1 | 9.64 ± 0.11 | 7.87 ± 0.15 | 0.8 |
| FL 46 × I2C-scFc | E1 | 6.06 ± 0.47 | 4.86 ± 0.35 | 0.8 |
| FL 61 × I2C-scFc | E3 | 11.65 ± 1.48 | 9.37 ± 1.46 | 0.8 |

### Example 7

### Confirmation of the Absence of Binding to Human Paralogues

[0463] Human FLT3 paralogues KIT v1 (SEQ ID NO: 805), CSF1R v1 (SEQ ID NO: 806), PDGFRA (SEQ ID NO: 807), and NTM v3 (SEQ ID NO: 808) were stably transfected into CHO cells. The sequence of the paralogue as used in the present example as identified in the sequence listing.

TABLE 4a
Identity of the paralogues with FLT3 over the full length of the protein
sequence

| Protein | % Identity | Query id (%) |
|---|---|---|
| c-KIT | 29 | 28 |
| CSF1R | 29 | 28 |
| PDGFRA | 27 | 30 |

TABLE 4b
Identity of the paralogues with FLT3 over the ECD
of the protein sequence

| Protein | % Identity | Query id (%) |
|---|---|---|
| NTM | 25 | 28 |

[0464] Protein expression was confirmed in FACS analyses with specific antibodies. The flow cytometry assay was carried out as described in Example 6.

### Example 8

### Identity to Human Germline

[0465] In order to analyze the identity/similarity of the sequence of the antibody constructs to the human antibody germline genes, the FLT3 binding domains of the invention were aligned as follows: Full VL including all CDRs was aligned; full VH including CDRs 1 and 2 but except CDR3 was aligned against human antibody germline genes (Vbase). More details can be found in the specification of this application.

### Example 9

### Cytotoxic Activity

[0466] The potency of FLT3×CD3 bispecific antibody constructs of the invention in redirecting effector T cells against FLT3-expressing target cells was analyzed in five in vitro cytotoxicity assays:
[0467] The potency of FLT3×CD3 bispecific antibody constructs in redirecting stimulated human CD8+ effector T cells against human FLT3-transfected CHO cells was measured in an 18 hour 51-chromium release assay.
[0468] The potency of FLT3×CD3 bispecific antibody constructs in redirecting stimulated human CD8+ effector T cells against the the FLT3 positive human AML cell lines EOL-1, MOLM-13 and MV4-11 (but other FLT3 positive human cell lines are also conceivable) was measured in an 18 hour 51-chromium release assay.
[0469] The potency of FLT3×CD3 bispecific antibody constructs in redirecting the T cells in unstimulated human PBMC against human FLT3-transfected CHO cells was measured in a 48 hour FACS-based cytotoxicity assay.
[0470] Effector cells: unstimulated human PBMC (CD14−/CD56−). Target cells: EOL-1. Effector to target cell (E:T)-ratio: 10:1. BiTE protein as indicated

FLT3xCD3 antibody constructs

| | FL | FL | FL | FL | FL | FL | FL | FL |
|---|---|---|---|---|---|---|---|---|
| | 39 | 16 | 42 | 36 | 52 | 23 | 46 | 61 |
| EC50 [pM] | 7.5 | 13 | 34 | 35 | 91 | 20 | 25 | 745 |

[0471] Effector cells: unstimulated human PBMC (CD14−/CD56−). Target cells: MV4-11. Effector to target cell (E:T)-ratio: 10:1. BiTE protein as indicated.

FLT3xCD3 antibody constructs

| | FL | FL | FL | FL | FL | FL | FL | FL |
|---|---|---|---|---|---|---|---|---|
| | 39 | 16 | 42 | 36 | 52 | 23 | 46 | 61 |
| EC50 [pM] | 4.8 | 8.1 | 13 | 15 | 14 | 13 | 12 | 270 |

[0472] The potency of FLT3×CD3 bispecific antibody constructs in redirecting the T cells in unstimulated human PBMC against the the FLT3 positive human AML cell lines EOL-1, MOLM-13 and MV4-11 (but other FLT3 positive human cell lines are also conceivable) was measured in a 48 hour FACS-based cytotoxicity assay.
[0473] For confirmation that the cross-reactive FLT3×CD3 bispecific antibody constructs are capable of redirecting macaque T cells against macaque FLT3-transfected CHO cells, a 48 hour FACS-based cytotoxicity assay was performed with a macaque T cell line as effector T cells.
[0474] Effector cells: unstimulated human PBMC (CD14−/CD56−). Target cells: mac FLT3 transfected CHO cells Effector to target cell (E:T)-ratio: 10:1. BiTE protein as indicated.

FLT3xCD3 antibody constructs

| | FL | FL | FL | FL | FL | FL | FL | FL |
|---|---|---|---|---|---|---|---|---|
| | 39 | 16 | 42 | 36 | 52 | 23 | 46 | 61 |
| EC50 [pM] | 0.2 | 0.5 | 1.0 | 2.5 | 0.7 | 1.9 | 11 | 0.9 |

[0475] The potency of FLT3×CD3 bispecific antibody constructs in redirecting the T cells in unstimulated human PBMC human FLT3-transfected CHO cells in the absence and presence of FLT3 ligand was measured in 48-hour FACS-based cytotoxicity assay. Effector cells: unstimulated human PBMC (CD14−/CD56−). Target cells: hu FLT3 transfected CHO cells. Effector to target cell (E:T)-ratio: 10:1. BiTE protein as indicated.

| | EC50 [pM] | | |
|---|---|---|---|
| FLT3 × CD3 | w/o FLT3 | w/ 10 ng/ml | w/ 1 μg/ml FLT3 |
| antibody constructs | LG | FLT3 LG | LG |
| FL 39 × I2C-scFc^{⊙} | 0.7 | 13 | 29 |
| FL 16 × I2C-scFc | 0.5 | 11 | 23 |
| FL 42 × I2C-scFc | 1.0 | 19 | e |
| FL 36 × I2C-scFc | 1.9 | 24 | 73 |
| FL 52 × I2C-scFc | 2.4 | 24 | 71 |
| FL 23 × I2C-scFc | 0.9 | 15 | 49 |
| FL 46 × I2C-scFc | 1.2 | 18 | 43 |
| FL 61 × I2C-scFc | 32 | 662 | 608 |

### Example 10.1

### Chromium Release Assay with Stimulated Human T Cells

[0476] Stimulated T cells enriched for CD8⁺ T cells were obtained as described in the following. A petri dish (145 mm diameter, Greiner bio-one GmbH, Kremsmünster) was coated with a commercially available anti-CD3 specific antibody (OKT3, Orthoclone) in a final concentration of 1 μg/ml for 1 hour at 37° C. Unbound protein was removed by one washing step with PBS. 3-5×10⁷ human PBMC were added to the precoated petri dish in 120 ml of RPMI 1640 with stabilized glutamine/10% FCS/IL-2 20 U/ml (Proleukin®, Chiron) and stimulated for 2 days. On the third day, the cells were collected and washed once with RPMI 1640. IL-2 was added to a final concentration of 20 U/ml and the cells were cultured again for one day in the same cell culture medium as above. CD8⁺ cytotoxic T lymphocytes (CTLs) were enriched by depletion of CD4⁺ T cells and CD56⁺ NK cells using Dynal-Beads according to the manufacturer's protocol.

[0477] Cyno FLT3- or human FLT3-transfected CHO target cells were washed twice with PBS and labeled with 11.1 MBq ⁵¹Cr in a final volume of 100 μl RPMI with 50% FCS for 60 minutes at 37° C. Subsequently, the labeled target cells were washed 3 times with 5 ml RPMI and then used in the cytotoxicity assay. The assay was performed in a 96-well plate in a total volume of 200 μl supplemented RPMI with an E:T ratio of 10:1. A starting concentration of 0.01-1 μg/ml of purified bispecific antibody construct and threefold dilutions thereof were used. Incubation time for the assay was 18 hours. Cytotoxicity was determined as relative values of released chromium in the supernatant relative to the difference of maximum lysis (addition of Triton-X) and spontaneous lysis (without effector cells). All measurements were carried out in quadruplicates. Measurement of chromium activity in the supernatants was performed in a Wizard 3″ gamma counter (Perkin Elmer Life Sciences GmbH, Köln, Germany). Analysis of the results was carried out with Prism 5 for Windows (version 5.0, GraphPad Software Inc., San Diego, Calif., USA). EC50 values calculated by the analysis program from the sigmoidal dose response curves were used for comparison of cytotoxic activity.

### Example 10.2

### Potency of Redirecting Stimulated Human Effector T Cells Against Human FLT3-Transfected CHO Cells

[0478] The cytotoxic activity of FLT3×CD3 bispecific antibody constructs according to the invention was analyzed in a 51-chromium (⁵¹Cr) release cytotoxicity assay using CHO cells transfected with human FLT3 as target cells, and stimulated human CD8+ T cells as effector cells. The experiment was carried out as described in Example 10.1.

### Example 10.3

### Potency of Redirecting Stimulated Human Effector T Cells Against a FLT3 Positive Human Cell Line

[0479] The cytotoxic activity of FLT3×CD3 bispecific antibody constructs was analyzed in a 51-chromium (⁵¹Cr) release cytotoxicity assay using the FLT3 positive human AML cell lines EOL-1, MOLM-13 and MV4-11 as source of target cells, and stimulated human CD8+ T cells as effector cells. The assay was carried out as described in Example 10.1.

### Example 10.4

### FACS-Based Cytotoxicity Assay with Unstimulated Human PBMC Isolation of Effector Cells

[0480] Human peripheral blood mononuclear cells (PBMC) were prepared by Ficoll density gradient centrifugation from enriched lymphocyte preparations (buffy coats), a side product of blood banks collecting blood for transfusions. Buffy coats were supplied by a local blood bank and PBMC were prepared on the same day of blood collection. After Ficoll density centrifugation and extensive washes with Dulbecco's PBS (Gibco), remaining erythrocytes were removed from PBMC via incubation with erythrocyte lysis buffer (155 mM NH₄Cl, 10 mM KHCO₃, 100 μM EDTA). Platelets were removed via the supernatant upon centrifugation of PBMC at 100×g. Remaining lymphocytes mainly encompass B and T lymphocytes, NK cells and monocytes. PBMC were kept in culture at 37° C./5% CO₂ in RPMI medium (Gibco) with 10% FCS (Gibco).

[0481] Depletion of CD14⁺ and CD56⁺ cells

[0482] For depletion of CD14⁺ cells, human CD14 MicroBeads (Milteny Biotec, MACS, #130-050-201) were used, for depletion of NK cells human CD56 MicroBeads (MACS, #130-050-401). PBMC were counted and centrifuged for 10 min at room temperature with 300×g. The supernatant was discarded and the cell pellet resuspended in MACS isolation buffer [80 μL/10⁷ cells; PBS (Invitrogen, #20012-043), 0.5% (v/v) FBS (Gibco, #10270-106), 2 mM EDTA (Sigma-Aldrich, #E-6511)]. CD14 MicroBeads and CD56 MicroBeads (20 μL/10⁷ cells) were added and incubated for 15 min at 4-8° C. The cells were washed with MACS isolation buffer (1-2 mL/10⁷ cells). After centrifugation (see above), supernatant was discarded and cells resuspended in MACS isolation buffer (500 μL/10⁸ cells). CD14/CD56 negative cells were then isolated using LS Columns (Miltenyi Biotec, #130-042-401). PBMC w/o CD14+/CD56+ cells were cultured in RPMI complete medium i.e. RPMI1640 (Biochrom AG, #FG1215) supplemented with 10% FBS (Biochrom AG, #S0115), 1× non-essential amino acids (Biochrom AG, #K0293), 10 mM Hepes buffer (Biochrom AG, #L1613), 1 mM sodium pyruvate (Biochrom AG, #L0473) and 100 U/mL penicillin/streptomycin (Biochrom AG, #A2213) at 37° C. in an incubator until needed.

[0483] Target Cell Labeling

[0484] For the analysis of cell lysis in flow cytometry assays, the fluorescent membrane dye DiOC₁₈ (DiO) (Molecular Probes, #V22886) was used to label human FLT3- or macaque FLT3-transfected CHO cells as target cells and distinguish them from effector cells. Briefly, cells were harvested, washed once with PBS and adjusted to 10⁶ cell/mL in PBS containing 2% (v/v) FBS and the membrane dye DiO (5 μL/10⁶ cells). After incubation for 3 min at 37° C., cells were washed twice in complete RPMI medium and the cell number adjusted to 1.25×10⁵ cells/mL. The vitality of cells was determined using 0.5% (v/v) isotonic EosinG solution (Roth, #45380).

[0485] Flow Cytometry Based Analysis

[0486] This assay was designed to quantify the lysis of cyno or human FLT3-transfected CHO cells in the presence of serial dilutions of FLT3 bispecific antibody constructs. Equal volumes of DiO-labeled target cells and effector cells (i.e., PBMC w/o CD14⁺ cells) were mixed, resulting in an E:T cell ratio of 10:1. 160 μl of this suspension were transferred to each well of a 96-well plate. 40 μL of serial dilutions of the FLT3×CD3 bispecific antibody constructs and a negative control bispecific (a CD3-based bispecific antibody construct recognizing an irrelevant target antigen) or RPMI complete medium as an additional negative control were added. The bispecific antibody-mediated cytotoxic reaction proceeded for 48 hours in a 7% CO₂ humidified incubator. Then cells were transferred to a new 96-well plate and loss of target cell membrane integrity was monitored by adding propidium iodide (PI) at a final concentration of 1 μg/mL. PI is a membrane impermeable dye that normally is excluded from viable cells, whereas dead cells take it up and become identifiable by fluorescent emission.

[0487] Samples were measured by flow cytometry on a FACSCanto II instrument and analyzed by FACSDiva software (both from Becton Dickinson). Target cells were identified as DiO-positive cells. PI-negative target cells were classified as living target cells. Percentage of cytotoxicity was calculated according to the following formula:

$$Cytotoxicity [ \% ] = \frac{{n}_{dead target cells}}{{n}_{target cells}} \times 100$$

$$n = number of events$$

[0488] Using GraphPad Prism 5 software (Graph Pad Software, San Diego), the percentage of cytotoxicity was plotted against the corresponding bispecific antibody construct concentrations. Dose response curves were analyzed with the four parametric logistic regression models for evaluation of sigmoid dose response curves with fixed hill slope and EC50 values were calculated.

### Example 10.5

### Potency of Redirecting Unstimulated Human PBMC Against Human FLT3-Transfected CHO Cells

[0489] The cytotoxic activity of FLT3×CD3 bispecific antibody constructs was analyzed in a FACS-based cytotoxicity assay using CHO cells transfected with human FLT3 as target cells, and unstimulated human PBMC as effector cells. The assay was carried out as described in Example 8.4 above.

### Example 10.6

### Potency of Redirecting Unstimulated Human PBMC Against a FLT3 Positive Human Ovarian Carcinoma Cell Line

[0490] The cytotoxic activity of FLT3×CD3 bispecific antibody constructs was furthermore analyzed in a FACS-based cytotoxicity assay using the FLT3 positive human AML cell lines EOL-1, MOLM-13 and MV4-11 as a source of target cells and unstimulated human PBMC as effector cells. The assay was carried out as described in Example 8.4 above.

### Example 10.7

### Potency of Redirecting Macaque T Cells Against Macaque FLT3-Expressing CHO Cells

[0491] Finally, the cytotoxic activity of FLT3×CD3 bispecific antibody constructs was analyzed in a FACS-based cytotoxicity assay using CHO cells transfected with macaque (cyno) FLT3 as target cells, and the macaque T cell line 4119LnPx (Knappe et al. Blood 95:3256-61 (2000)) as source of effector cells. Target cell labeling of macaque FLT3-transfected CHO cells and flow cytometry based analysis of cytotoxic activity was performed as described above.

### Example 11

### Monomer to Dimer Conversion after (i) Three Freeze/Thaw Cycles and (ii) 7 Days of Incubation at 250 μg/ml

[0492] Bispecific FLT3×CD3 antibody monomeric construct was subjected to different stress conditions followed by high performance SEC to determine the percentage of initially monomeric antibody construct, which had been converted into dimeric antibody construct.
[0493] (i) 25 μg of monomeric antibody construct were adjusted to a concentration of 250 μg/ml with generic formulation buffer and then frozen at −80° C. for 30 min followed by thawing for 30 min at room temperature. After three freeze/thaw cycles the dimer content was determined by HP-SEC.
[0494] (ii) 25 μg of monomeric antibody construct were adjusted to a concentration of 250 μg/ml with generic formulation buffer followed by incubation at 37° C. for 7 days. The dimer content was determined by HP-SEC.

[0495] A high resolution SEC Column TSK Gel G3000 SWXL (Tosoh, Tokyo-Japan) was connected to an Äkta Purifier 10 FPLC (GE Lifesciences) equipped with an A905 Autosampler. Column equilibration and running buffer consisted of 100 mM KH2PO4-200 mM Na2SO4 adjusted to pH 6.6. The antibody solution (25 μg protein) was applied to the equilibrated column and elution was carried out at a flow rate of 0.75 ml/min at a maximum pressure of 7 MPa. The whole run was monitored at 280, 254 and 210 nm optical absorbance. Analysis was done by peak integration of the 210 nm signal recorded in the Äkta Unicorn software run evaluation sheet. Dimer content was calculated by dividing the area of the dimer peak by the total area of monomer plus dimer peak.

### Example 12

### Thermostability

[0496] Antibody aggregation temperature was determined as follows: 40 μl of antibody construct solution at 250 μg/ml were transferred into a single use cuvette and placed in a Wyatt Dynamic Light Scattering device DynaPro Nanostar (Wyatt). The sample was heated from 40° C. to 70° C. at a heating rate of 0.5° C./min with constant acquisition of the measured radius. Increase of radius indicating melting of the protein and aggregation was used by the software package delivered with the DLS device to calculate the aggregation temperature of the antibody construct.

### Example 13

### Stability after Incubation for 24 Hours in Human Plasma

[0497] Purified bispecific antibody constructs were incubated at a ratio of 1:5 in a human plasma pool at 37° C. for 96 hours at a final concentration of 2-20 μg/ml. After plasma incubation the antibody constructs were compared in a 51-chromium release assay with stimulated enriched human CD8+ T cells and human FLT3-transfected CHO cells at a starting concentration of 0.01-0.1 μg/ml and with an effector to target cell (E:T) ratio of 10:1 (assay as described in Example 8.1). Non-incubated, freshly thawed bispecific antibody constructs were included as controls.

### Example 14

### Turbidity at 2500 μg/ml Antibody Concentration

[0498] 1 ml of purified antibody construct solution of a concentration of 250 μg/ml was concentrated by spin concentration units to 2500 μg/ml. After 16 h storage at 5° C. the turbidity of the antibody solution was determined by CD340 nm optical absorption measurement against the generic formulation buffer.

### Example 15

### Protein Homogeneity by High Resolution Cation Exchange Chromatography

[0499] The protein homogeneity the antibody constructs of the invention was analyzed by high resolution cation exchange chromatography CIEX.

[0500] 50 μg of antibody construct monomer were diluted with 50 ml binding buffer A (20 mM sodium dihydrogen phosphate, 30 mM NaCl, 0.01% sodium octanate, pH 5.5), and 40 ml of this solution were applied to a 1 ml BioPro SP-F column (YMC, Germany) connected to an Äkta Micro FPLC device (GE Healthcare, Germany). After sample binding, a wash step with further binding buffer was carried out. For protein elution, a linear increasing salt gradient using buffer B (20 mM sodium dihydrogen phosphate, 1000 mM NaCl, 0.01% sodium octanate, pH 5.5) up to 50% percent buffer B was applied over 10 column volumes. The whole run was monitored at 280, 254 and 210 nm optical absorbance. Analysis was done by peak integration of the 280 nm signal recorded in the Äkta Unicorn software run evaluation sheet.

### Example 16

### Surface Hydrophobicity as Measured by HIC Butyl

[0501] The surface hydrophobicity of bispecific antibody constructs of the invention was tested in Hydrophobic Interaction Chromatography HIC in flow-through mode.

[0502] 50 μg of antibody construct monomer were diluted with generic formulation buffer to a final volume of 500 μl (10 mM citric acid, 75 mM lysine HCl, 4% trehalose, pH 7.0) and applied to a 1 ml Butyl Sepharose FF column (GE Healthcare, Germany) connected to a Äkta Purifier FPLC system (GE Healthcare, Germany). The whole run was monitored at 280, 254 and 210 nm optical absorbance. Analysis was done by peak integration of the 280 nm signal recorded in the Äkta Unicorn software run evaluation sheet. Elution behavior was evaluated by comparing area and velocity of rise and decline of protein signal thereby indicating the strength of interaction of the BiTE albumin fusion with the matrix.

### Example 17

### Potency Gap Between the Monomeric and the Dimeric Isoform of Bispecific Antibody Constructs

[0503] In order to determine the difference in cytotoxic activity between the monomeric and the dimeric isoform of individual FLT3×CD3 bispecific antibody constructs (referred to as potency gap), an 18 hour 51-chromium release cytotoxicity assay was carried out as described hereinabove (Example 10.1) with purified bispecific antibody construct monomer and dimer. Effector cells were stimulated enriched human CD8+ T cells. Target cells were hu FLT3 transfected CHO cells. Effector to target cell (E:T) ratio was 10:1. The potency gap was calculated as ratio between EC50 values.

| | | | Monomer to dimer |
|---|---|---|---|
| | | | ratio |
| FLT3 × CD3 | EC50 [pM] | | (EC₅₀ Monomer/EC₅₀ |
| antibody constructs | Monomer | Dimer | Dimer) |
| FL 39 × I2C-scFc^{⊙} | 0.37 | 0.23 | 0.5 |
| FL 16 × I2C-scFc | 0.52 | 0.16 | 2.0 |
| FL 42 × I2C-scFc | 0.53 | 0.76 | 1.2 |
| FL 36 × I2C-scFc | 2.70 | 0.88 | 1.1 |
| FL 52 × I2C-scFc | 1.45 | 1.69 | 9.9 |
| FL 23 × I2C-scFc | 0.20 | 0.20 | 0.2 |
| FL 46 × I2C-scFc | 0.34 | 0.15 | 0.9 |
| FL 61 × I2C-scFc | 18 | 24 | 6.3 |

### Example 18

### FLT3 Ligand Competition of Binding of the FLT3 Binder to its Target

[0504] This assay was carried out to test whether the soluble FLT3 ligand would impair binding of the anti-FLT3 binding domains according to the invention to FLT3.

[0505] To verify binding of human FLT3 ligand to CHO cells transfected with human FLT3, cells were incubated with human FLT3 ligand for 30 minutes at 4° C. Bound FLT3 ligand was detected with an anti-HIS antibody (5 μg/ml; AbD Serotec) followed by an anti-mouse IgG Fc-gamma-PE (1:100; Jackson Immunoresearch #115-116-071). As negative control cells were incubated with PBS/2% FCS instead of CD27.

[0506] To test competition/replacement of FLT3 binder by FLT3 ligand, CHO cells transfected with human FLT3 were incubated with or without FLT3 ligand for 30 minutes at 4° C. (10 μg/FLT3 ligand). Afterwards cells were not washed but directly stained with FLT3 binder (scFv's). Bound scFv were detected with mouse monoclonal anti-FLAG M2 antibody (1 μg/ml; Sigma F1804) followed by an anti-mouse IgG Fc-gamma-PE (1:100; Jackson Immunoresearch #115-116-071). As negative control, cells were incubated with an unspecific scFv instead of FLT3 scFv. FLT3 ligand and all antibodies were diluted in PBS with 2% FCS.

[0507] For the evaluation of the data, the fluorescence median was detected by FACS. A loss of more than 25% of the signal as a result of the competition with the FLT3 ligand was understood as significant impact on the binding. This can be understood as significant steric interaction for the same domain of FLT3. All binders above the 75% threshold

(median [+ligand]/median [w/o ligand]*100≧75%)

(which is true for FL-1 to FL-65) are identified as non-sensitive for the FLT3 ligand competition.

[0508] The interaction of FLT3 ligand with its receptor is described in the literature to take place in the region corresponding to epitope cluster 3. Therefore, it was expected that all binders identified in our screening to be specific for the epitope cluster 3, as well as those for the neighbouring cluster 2 and 4, would be significantly impacted in the signal of the fluorescence median by the competition with the FLT3 ligand. This expectation was in general correct. Surprisingly, FL-53, FL-54, FL-61, F-62, FL-63 and FL-64, which all bind to epitope cluster 3, still showed a signal above the threshold.

[0509] Moreover, in view of the interaction of FLT3 ligand with the region of epitope cluster 3 it was further assumed that binder for more distant epitope cluster, such as cluster 1 of FLT3, would not be impacted by the FLT3 ligand competition. However, there were a significant number of binders, which did not qualify for the 75% threshold. The binder FL-1 to FL-53, FL-55 to FL-60 and FL-65 were in the group of binders not sensitive for the FLT3 ligand competition.

TABLE 10
Sequence Listing

| SEQ | | | |
|---|---|---|---|
| ID | Descrip- | | |
| NO: | tion | Source | Sequence |
| 1 | Peptide | artifi- | GGGG |
| | linker | cial | |
| 2 | Peptide | artifi- | GGGGS |
| | linker | cial | |
| 3 | Peptide | artifi- | GGGGQ |
| | linker | cial | |
| 4 | Peptide | artifi- | PGGGGS |
| | linker | cial | |
| 5 | Peptide | artifi- | PGGDGS |
| | linker | cial | |
| 6 | Peptide | artifi- | SGGGGS |
| | linker | cial | |
| 7 | Peptide | artifi- | GGGGSGGGS |
| | linker | cial | |
| 8 | Peptide | artifi- | GGGGSGGGGS |
| | linker | cial | |
| 9 | Peptide | artifi- | GGGGSGGGGSGGGGS |
| | linker | cial | |
| 10 | Hexa- | artifi- | HHHHHH |
| | histidine | cial | |
| 11 | CDR-L1 | artifi- | GSSTGAVTSGYYPN |
| | of F6A | cial | |
| 12 | CDR-L2 | artifi- | GTKFLAP |
| | of F6A | cial | |
| 13 | CDR-L3 | artifi- | ALWYSNRWV |
| | of F6A | cial | |
| 14 | CDR-H1 | artifi- | IYAMN |
| | of F6A | cial | |
| 15 | CDR-H2 | artifi- | RIRSKYNNYATYYADSVKS |
| | of F6A | cial | |
| 16 | CDR-H3 | artifi- | HGNFGNSYVSFFAY |
| | of F6A | cial | |
| 17 | VH of | artifi- | EVQLVESGGGLVQPGGSLKLSCAASGFTFNIYAMNWVRQAPGKGLEWVARIRSKYNNYATYYADSVKSRFTISRDDSKNT |
| | F6A | cial | AYLQMNNLKTEDTAVYYCVRHGNFGNSYVSFFAYWGQGTLVTVSS |
| 18 | VL of | artifi- | QTVVTQEPSLTVSPGGTVTLTCGSSTGAVTSGYYPNWVQQKPGQAPRGLIGGTKFLAPGTPARFSGSLLGGKAALTLSGV |
| | F6A | cial | QPEDEAEYYCALWYSNRWVFGGGTKLTVL |
| 19 | VH-VL | artifi- | EVQLVESGGGLVQPGGSLKLSCAASGFTFNIYAMNWVRQAPGKGLEWVARIRSKYNNYATYYADSVKSRFTISRDDSKNT |
| | of F6A | cial | AYLQMNNLKTEDTAVYYCVRHGNFGNSYVSFFAYWGQGTLVTVSSGGGGSGGGGSGGGGSQTVVTQEPSLTVSPGGTVTL |
| | | | TCGSSTGAVTSGYYPNWVQQKPGQAPRGLIGGTKFLAPGTPARFSGSLLGGKAALTLSGVQPEDEAEYYCALWYSNRWVF |
| | | | GGGTKLTVL |
| 20 | CDR-L1 | artifi- | GSSTGAVTSGYYPN |
| | of H2C | cial | |
| 21 | CDR-L2 | artifi- | GTKFLAP |
| | of H2C | cial | |
| 22 | CDR-L3 | artifi- | ALWYSNRWV |
| | of H2C | cial | |
| 23 | CDR-H1 | artifi- | KYAMN |
| | of H2C | cial | |
| 24 | CDR-H2 | artifi- | RIRSKYNNYATYYADSVKD |
| | of H2C | cial | |
| 25 | CDR-H3 | artifi- | HGNFGNSYISYWAY |
| | of H2C | cial | |
| 26 | VH of | artifi- | EVQLVESGGGLVQPGGSLKLSCAASGFTFNKYAMNWVRQAPGKGLEWVARIRSKYNNYATYYADSVKDRFTISRDDSKNT |
| | H2C | cial | AYLQMNNLKTEDTAVYYCVRHGNFGNSYISYWAYWGQGTLVTVSS |
| 27 | VL of | artifi- | QTVVTQEPSLTVSPGGTVTLTCGSSTGAVTSGYYPNWVQQKPGQAPRGLIGGTKFLAPGTPARFSGSLLGGKAALTLSGV |
| | H2C | cial | QPEDEAEYYCALWYSNRWVFGGGTKLTVL |
| 28 | VH-VL | artifi- | EVQLVESGGGLVQPGGSLKLSCAASGFTFNKYAMNWVRQAPGKGLEWVARIRSKYNNYATYYADSVKDRFTISRDDSKNT |
| | of H2C | cial | AYLQMNNLKTEDTAVYYCVRHGNFGNSYISYWAYWGQGTLVTVSSGGGGSGGGGSGGGGSQTVVTQEPSLTVSPGGTVTL |
| | | | TCGSSTGAVTSGYYPNWVQQKPGQAPRGLIGGTKFLAPGTPARFSGSLLGGKAALTLSGVQPEDEAEYYCALWYSNRWVF |
| | | | GGGTKLTVL |
| 29 | CDR-L1 | artifi- | GSSTGAVTSGYYPN |
| | of H1E | cial | |
| 30 | CDR-L2 | artifi- | GTKFLAP |
| | of H1E | cial | |
| 31 | CDR-L3 | artifi- | ALWYSNRWV |
| | of H1E | cial | |
| 32 | CDR-H1 | artifi- | SYAMN |
| | of H1E | cial | |
| 33 | CDR-H2 | artifi- | RIRSKYNNYATYYADSVKG |
| | of H1E | cial | |
| 34 | CDR-H3 | artifi- | HGNFGNSYLSFWAY |
| | of H1E | cial | |
| 35 | VH of | artifi- | EVQLVESGGGLEQPGGSLKLSCAASGFTFNSYAMNWVRQAPGKGLEWVARIRSKYNNYATYYADSVKGRFTISRDDSKNT |
| | H1E | cial | AYLQMNNLKTEDTAVYYCVRHGNFGNSYLSFWAYWGQGTLVTVSS |
| 36 | VL of | artifi- | QTVVTQEPSLTVSPGGTVTLTCGSSTGAVTSGYYPNWVQQKPGQAPRGLIGGTKFLAPGTPARFSGSLLGGKAALTLSGV |
| | H1E | cial | QPEDEAEYYCALWYSNRWVFGGGTKLTVL |
| 37 | VH-VL | artifi- | EVQLVESGGGLEQPGGSLKLSCAASGFTFNSYAMNWVRQAPGKGLEWVARIRSKYNNYATYYADSVKGRFTISRDDSKNT |
| | of H1E | cial | AYLQMNNLKTEDTAVYYCVRHGNFGNSYLSFWAYWGQGTLVTVSSGGGGSGGGGSGGGGSQTVVTQEPSLTVSPGGTVTL |
| | | | TCGSSTGAVTSGYYPNWVQQKPGQAPRGLIGGTKFLAPGTPARFSGSLLGGKAALTLSGVQPEDEAEYYCALWYSNRWVF |
| | | | GGGTKLTVL |
| 38 | CDR-L1 | artifi- | GSSTGAVTSGYYPN |
| | of G4H | cial | |
| 39 | CDR-L2 | artifi- | GTKFLAP |
| | of G4H | cial | |
| 40 | CDR-L3 | artifi- | ALWYSNRWV |
| | of G4H | cial | |
| 41 | CDR-H1 | artifi- | RYAMN |
| | of G4H | cial | |
| 42 | CDR-H2 | artifi- | RIRSKYNNYATYYADSVKG |
| | of G4H | cial | |
| 43 | CDR-H3 | artifi- | HGNFGNSYLSYFAY |
| | of G4H | cial | |
| 44 | VH of | artifi- | EVQLVESGGGLVQPGGSLKLSCAASGFTFNRYAMNWVRQAPGKGLEWVARIRSKYNNYATYYADSVKGRFTISRDDSKNT |
| | G4H | cial | AYLQMNNLKTEDTAVYYCVRHGNFGNSYLSYFAYWGQGTLVTVSS |
| 45 | VL of | artifi- | QTVVTQEPSLTVSPGGTVTLTCGSSTGAVTSGYYPNWVQQKPGQAPRGLIGGTKFLAPGTPARFSGSLLGGKAALTLSGV |
| | G4H | cial | QPEDEAEYYCALWYSNRWVFGGGTKLTVL |
| 46 | VH-VL | artifi- | EVQLVESGGGLVQPGGSLKLSCAASGFTFNRYAMNWVRQAPGKGLEWVARIRSKYNNYATYYADSVKGRFTISRDDSKNT |
| | of G4H | cial | AYLQMNNLKTEDTAVYYCVRHGNFGNSYLSYFAYWGQGTLVTVSSGGGGSGGGGSGGGGSQTVVTQEPSLTVSPGGTVTL |
| | | | TCGSSTGAVTSGYYPNWVQQKPGQAPRGLIGGTKFLAPGTPARFSGSLLGGKAALTLSGVQPEDEAEYYCALWYSNRWVF |
| | | | GGGTKLTVL |
| 47 | CDR-L1 | artifi- | RSSTGAVTSGYYPN |
| | of A2J | cial | |
| 48 | CDR-L2 | artifi- | ATDMRPS |
| | of A2J | cial | |
| 49 | CDR-L3 | artifi- | ALWYSNRWV |
| | of A2J | cial | |
| 50 | CDR-H1 | artifi- | VYAMN |
| | of A2J | cial | |
| 51 | CDR-H2 | artifi- | RIRSKYNNYATYYADSVKK |
| | of A2J | cial | |
| 52 | CDR-H3 | artifi- | HGNFGNSYLSWWAY |
| | of A2J | cial | |
| 53 | VH of | artifi- | EVQLVESGGGLVQPGGSLKLSCAASGFTFNVYAMNWVRQAPGKGLEWVARIRSKYNNYATYYADSVKKRFTISRDDSKNT |
| | A2J | cial | AYLQMNNLKTEDTAVYYCVRHGNFGNSYLSWWAYWGQGTLVTVSS |
| 54 | VL of | artifi- | QTVVTQEPSLTVSPGGTVTLTCRSSTGAVTSGYYPNWVQQKPGQAPRGLIGATDMRPSGTPARFSGSLLGGKAALTLSGV |
| | A2J | cial | QPEDEAEYYCALWYSNRWVFGGGTKLTVL |
| 55 | VH-VL | artifi- | EVQLVESGGGLVQPGGSLKLSCAASGFTFNVYAMNWVRQAPGKGLEWVARIRSKYNNYATYYADSVKKRFTISRDDSKNT |
| | of A2J | cial | AYLQMNNLKTEDTAVYYCVRHGNFGNSYLSWWAYWGQGTLVTVSSGGGGSGGGGSGGGGSQTVVTQEPSLTVSPGGTVTL |
| | | | TCRSSTGAVTSGYYPNWVQQKPGQAPRGLIGATDMRPSGTPARFSGSLLGGKAALTLSGVQPEDEAEYYCALWYSNRWVF |
| | | | GGGTKLTVL |
| 56 | CDR-L1 | artifi- | GSSTGAVTSGYYPN |
| | of E1L | cial | |
| 57 | CDR-L2 | artifi- | GTKFLAP |
| | of E1L | cial | |
| 58 | CDR-L3 | artifi- | ALWYSNRWV |
| | of E1L | cial | |
| 59 | CDR-H1 | artifi- | KYAMN |
| | of E1L | cial | |
| 60 | CDR-H2 | artifi- | RIRSKYNNYATYYADSVKS |
| | of E1L | cial | |
| 61 | CDR-H3 | artifi- | HGNFGNSYTSYYAY |
| | of E1L | cial | |
| 62 | VH of | artifi- | EVQLVESGGGLVQPGGSLKLSCAASGFTFNKYAMNWVRQAPGKGLEWVARIRSKYNNYATYYADSVKSRFTISRDDSKNT |
| | E1L | cial | AYLQMNNLKTEDTAVYYCVRHGNFGNSYTSYYAYWGQGTLVTVSS |
| 63 | VL of | artifi- | QTVVTQEPSLTVSPGGTVTLTCGSSTGAVTSGYYPNWVQQKPGQAPRGLIGGTKFLAPGTPARFSGSLLGGKAALTLSGV |
| | E1L | cial | QPEDEAEYYCALWYSNRWVFGGGTKLTVL |
| 64 | VH-VL | artifi- | EVQLVESGGGLVQPGGSLKLSCAASGFTFNKYAMNWVRQAPGKGLEWVARIRSKYNNYATYYADSVKSRFTISRDDSKNT |
| | of E1L | cial | AYLQMNNLKTEDTAVYYCVRHGNFGNSYTSYYAYWGQGTLVTVSSGGGGSGGGGSGGGGSQTVVTQEPSLTVSPGGTVTL |
| | | | TCGSSTGAVTSGYYPNWVQQKPGQAPRGLIGGTKFLAPGTPARFSGSLLGGKAALTLSGVQPEDEAEYYCALWYSNRWVF |
| | | | GGGTKLTVL |
| 65 | CDR-L1 | artifi- | RSSTGAVTSGYYPN |
| | of E2M | cial | |
| 66 | CDR-L2 | artifi- | ATDMRPS |
| | of E2M | cial | |
| 67 | CDR-L3 | artifi- | ALWYSNRWV |
| | of E2M | cial | |
| 68 | CDR-H1 | artifi- | GYAMN |
| | of E2M | cial | |
| 69 | CDR-H2 | artifi- | RIRSKYNNYATYYADSVKE |
| | of E2M | cial | |
| 70 | CDR-H3 | artifi- | HRNFGNSYLSWFAY |
| | of E2M | cial | |
| 71 | VH of | artifi- | EVQLVESGGGLVQPGGSLKLSCAASGFTFNGYAMNWVRQAPGKGLEWVARIRSKYNNYATYYADSVKERFTISRDDSKNT |
| | E2M | cial | AYLQMNNLKTEDTAVYYCVRHRNFGNSYLSWFAYWGQGTLVTVSS |
| 72 | VL of | artifi- | QTVVTQEPSLTVSPGGTVTLTCRSSTGAVTSGYYPNWVQQKPGQAPRGLIGATDMRPSGTPARFSGSLLGGKAALTLSGV |
| | E2M | cial | QPEDEAEYYCALWYSNRWVFGGGTKLTVL |
| 73 | VH-VL | artifi- | EVQLVESGGGLVQPGGSLKLSCAASGFTFNGYAMNWVRQAPGKGLEWVARIRSKYNNYATYYADSVKERFTISRDDSKNT |
| | of E2M | cial | AYLQMNNLKTEDTAVYYCVRHRNFGNSYLSWFAYWGQGTLVTVSSGGGGSGGGGSGGGGSQTVVTQEPSLTVSPGGTVTL |
| | | | TCRSSTGAVTSGYYPNWVQQKPGQAPRGLIGATDMRPSGTPARFSGSLLGGKAALTLSGVQPEDEAEYYCALWYSNRWVF |
| | | | GGGTKLTVL |
| 74 | CDR-L1 | artifi- | GSSTGAVTSGYYPN |
| | of F7O | cial | |
| 75 | CDR-L2 | artifi- | GTKFLAP |
| | of F7O | cial | |
| 76 | CDR-L3 | artifi- | ALWYSNRWV |
| | of F7O | cial | |
| 77 | CDR-H1 | artifi- | VYAMN |
| | of F7O | cial | |
| 78 | CDR-H2 | artifi- | RIRSKYNNYATYYADSVKK |
| | of F7O | cial | |
| 79 | CDR-H3 | artifi- | HGNFGNSYISWWAY |
| | of F7O | cial | |
| 80 | VH of | artifi- | EVQLVESGGGLVQPGGSLKLSCAASGFTFNVYAMNWVRQAPGKGLEWVARIRSKYNNYATYYADSVKKRFTISRDDSKNT |
| | F7O | cial | AYLQMNNLKTEDTAVYYCVRHGNFGNSYISWWAYWGQGTLVTVSS |
| 81 | VL of | artifi- | QTVVTQEPSLTVSPGGTVTLTCGSSTGAVTSGYYPNWVQQKPGQAPRGLIGGTKFLAPGTPARFSGSLLGGKAALTLSGV |
| | F7O | cial | QPEDEAEYYCALWYSNRWVFGGGTKLTVL |
| 82 | VH-VL | artifi- | EVQLVESGGGLVQPGGSLKLSCAASGFTFNVYAMNWVRQAPGKGLEWVARIRSKYNNYATYYADSVKKRFTISRDDSKNT |
| | of F7O | cial | AYLQMNNLKTEDTAVYYCVRHGNFGNSYISWWAYWGQGTLVTVSSGGGGSGGGGSGGGGSQTVVTQEPSLTVSPGGTVTL |
| | | | TCGSSTGAVTSGYYPNWVQQKPGQAPRGLIGGTKFLAPGTPARFSGSLLGGKAALTLSGVQPEDEAEYYCALWYSNRWVF |
| | | | GGGTKLTVL |
| 83 | CDR-L1 | artifi- | GSSTGAVTSGNYPN |
| | of F12Q | cial | |
| 84 | CDR-L2 | artifi- | GTKFLAP |
| | of F12Q | cial | |
| 85 | CDR-L3 | artifi- | VLWYSNRWV |
| | of F12Q | cial | |
| 86 | CDR-H1 | artifi- | SYAMN |
| | of F12Q | cial | |
| 87 | CDR-H2 | artifi- | RIRSKYNNYATYYADSVKG |
| | of F12Q | cial | |
| 88 | CDR-H3 | artifi- | HGNFGNSYVSWWAY |
| | of F12Q | cial | |
| 89 | VH of | artifi- | EVQLVESGGGLVQPGGSLKLSCAASGFTFNSYAMNWVRQAPGKGLEWVARIRSKYNNYATYYADSVKGRFTISRDDSKNT |
| | F12Q | cial | AYLQMNNLKTEDTAVYYCVRHGNFGNSYVSWWAYWGQGTLVTVSS |
| 90 | VL of | artifi- | QTVVTQEPSLTVSPGGTVTLTCGSSTGAVTSGNYPNWVQQKPGQAPRGLIGGTKFLAPGTPARFSGSLLGGKAALTLSGV |
| | F12Q | cial | QPEDEAEYYCVLWYSNRWVFGGGTKLTVL |
| 91 | VH-VL | artifi- | EVQLVESGGGLVQPGGSLKLSCAASGFTFNSYAMNWVRQAPGKGLEWVARIRSKYNNYATYYADSVKGRFTISRDDSKNT |
| | of F12Q | cial | AYLQMNNLKTEDTAVYYCVRHGNFGNSYVSWWAYWGQGTLVTVSSGGGGSGGGGSGGGGSQTVVTQEPSLTVSPGGTVTL |
| | | | TCGSSTGAVTSGNYPNWVQQKPGQAPRGLIGGTKFLAPGTPARFSGSLLGGKAALTLSGVQPEDEAEYYCVLWYSNRWVF |
| | | | GGGTKLTVL |
| 92 | CDR-L1 | artifi- | GSSTGAVTSGNYPN |
| | of I2C | cial | |
| 93 | CDR-L2 | artifi- | GTKFLAP |
| | of I2C | cial | |
| 94 | CDR-L3 | artifi- | VLWYSNRWV |
| | of I2C | cial | |
| 95 | CDR-H1 | artifi- | KYAMN |
| | of I2C | cial | |
| 96 | CDR-H2 | artifi- | RIRSKYNNYATYYADSVKD |
| | of I2C | cial | |
| 97 | CDR-H3 | artifi- | HGNFGNSYISYWAY |
| | of I2C | cial | |
| 98 | VH of | artifi- | EVQLVESGGGLVQPGGSLKLSCAASGFTFNKYAMNWVRQAPGKGLEWVARIRSKYNNYATYYADSVKDRFTISRDDSKNT |
| | I2C | cial | AYLQMNNLKTEDTAVYYCVRHGNFGNSYISYWAYWGQGTLVTVSS |
| 99 | VL of | artifi- | QTVVTQEPSLTVSPGGTVTLTCGSSTGAVTSGNYPNWVQQKPGQAPRGLIGGTKFLAPGTPARFSGSLLGGKAALTLSGV |
| | I2C | cial | QPEDEAEYYCVLWYSNRWVFGGGTKLTVL |
| 100 | VH-VL | artifi- | EVQLVESGGGLVQPGGSLKLSCAASGFTFNKYAMNWVRQAPGKGLEWVARIRSKYNNYATYYADSVKDRFTISRDDSKNT |
| | of I2C | cial | AYLQMNNLKTEDTAVYYCVRHGNFGNSYISYWAYWGQGTLVTVSSGGGGSGGGGSGGGGSQTVVTQEPSLTVSPGGTVTL |
| | | | TCGSSTGAVTSGNYPNWVQQKPGQAPRGLIGGTKFLAPGTPARFSGSLLGGKAALTLSGVQPEDEAEYYCVLWYSNRWVF |
| | | | GGGTKLTVL |
| 101 | VH of | artifi- | EVQLVESGGGLVQPGGSLRLSCAASGFTFNSYAMNWVRQAPGKGLEWVARIRSKYNNYATYYADSVKGRFTISRDDSKNT |
| | F12q | cial | AYLQMNSLKTEDTAVYYCVRHGNFGNSYVSWWAYWGQGTLVTVSS |
| 102 | VL of | artifi- | QTVVTQEPSLTVSPGGTVTLTCGSSTGAVTSGNYPNWVQQKPGQAPRGLIGGTKFLAPGTPARFSGSLLGGKAALTLSGV |
| | F12q | cial | QPEDEAEYYCVLWYSNRWVFGGGTKLTVL |
| 103 | F12q | scFv | EVQLVESGGGLVQPGGSLRLSCAASGFTFNSYAMNWVRQAPGKGLEWVARIRSKYNNYATYYADSVKGRFTISRDDSKNT |
| | | | AYLQMNSLKTEDTAVYYCVRHGNFGNSYVSWWAYWGQGTLVTVSSGGGGSGGGGSGGGGSQTVVTQEPSLTVSPGGTVTL |
| | | | TCGSSTGAVTSGNYPNWVQQKPGQAPRGLIGGTKFLAPGTPARFSGSLLGGKAALTLSGVQPEDEAEYYCVLWYSNRWVF |
| | | | GGGTKLTVL |
| 104 | HALB | human | DAHKSEVAHRFKDLGEENFKALVLIAFAQYLQQCPFEDHVKLVNEVTEFAKTCVADESAENCDKSLHTLFGDKLCTVATL |
| | | | RETYGEMADCCAKQEPERNECFLQHKDDNPNLPRLVRPEVDVMCTAFHDNEETFLKKYLYEIARRHPYFYAPELLFFAKR |
| | | | YKAAFTECCQAADKAACLLPKLDELRDEGKASSAKQRLKCASLQKFGERAFKAWAVARLSQRFPKAEFAEVSKLVTDLTK |
| | | | VHTECCHGDLLECADDRADLAKYICENQDSISSKLKECCEKPLLEKSHCIAEVENDEMPADLPSLAADFVESKDVCKNYA |
| | | | EAKDVFLGMFLYEYARRHPDYSVVLLLRLAKTYETTLEKCCAAADPHECYAKVFDEFKPLVEEPQNLIKQNCELFEQLGE |
| | | | YKFQNALLVRYTKKVPQVSTPTLVEVSRNLGKVGSKCCKHPEAKRMPCAEDYLSVVLNQLCVLHEKTPVSDRVTKCCTES |
| | | | LVNRRPCFSALEVDETYVPKEFNAETFTFHADICTLSEKERQIKKQTALVELVKHKPKATKEQLKAVMDDFAAFVEKCCK |
| | | | ADDKETCFAEEGKKLVAASQAALGL |
| 105 | HALB7 | artifi- | DAHKSEVAHRFKDLGEENFKALVLIAFAQYLQQCPFEDHVKLVNEVTEFAKTCVADESAENCDKSLHTLFGDKLCTVATL |
| | | cial | RETYGEMADCCAKQEPERNECFLQHKDDNPNLPRLVRPEVDVMCTAFHDNEETFLKKYLYEIARRHPYFYAPELLFFAKR |
| | | | YKAAFTECCQAADKAACLLPKLDELRDEGKASSAKQRLKCASLQKFGERAFKAWAVARLSQRFPKAEFAEVSKLVTDLTK |
| | | | VHTECCHGDLLECADDRADLAKYICENQDSISSKLKECCEKPLLEKSHCIAEVENDEMPADLPSLAADFVESKDVCKNYA |
| | | | EAKDVFLGMFLYEYARRHPDYSVVLLLRLAKTYETTLEKCCAAADPHECYAKVFDEFKPLVEEPQNLIKQNCELFEQLGE |
| | | | YKFQNALLVRYTKKVPQVSTPTLVEVSRNLGKVGSKCCKHPEAKRMPCAEDYLSVVLNQLCVLHEKTPVSDRVTKCCTES |
| | | | LVNRRPCFSALEVDETYVPKEFNAGTFTFHADICTLSEKERQIKKQTALVELVKHKPKATKEQLKAAMDDFAAFVEKCCK |
| | | | ADDKETCFAEEGKKLVAASQAALGL |
| 106 | HALB098 | artifi- | DAHKSEVAHRFKDLGEENFKALVLIAFAQYLQQCPFEDHVKLVNEVTEFAKTCVADESAENCDKSLHTLFGDKLCTVATL |
| | | cial | RETYGEMADCCAKQEPERNECFLQHKDDNPNLPRLVRPEVDVMCTAFHDNEETFLKKYLYEIARRHPYFYAPELLFFAKR |
| | | | YKAAFTECCQAADKAACLLPKLDELRDEGKASSAKQRLKCASLQKFGERAFKAWAVARLSQRFPKAEFAEVSKLVTDLTK |
| | | | VHTECCHGDLLECADDRADLAKYICENQDSISSKLKECCEKPLLEKSHCIAEVENDEMPADLPSLAADFVESKDVCKNYA |
| | | | EAKDVFLGMFLYEYARRHPDYSVVLLLRLAKTYETTLEKCCAAADPHECYAKVFDEFKPLVEEPQNLIKQNCELFEQLGE |
| | | | YKFQNALLVRYTKKVPQVSTPTLVEVSRNLGKVGSKCCKHPEAKRMPCAEDYLSVVLNQLCVLHEKTPVSDRVTKCCTES |
| | | | LVNRRPCFSALEVDETYVPKEFNAETFTFHADICTLSEKERQIKKQTALVELVKHKPKATKEQLKAVMDDFAAFVEKCCK |
| | | | ADDKETCFAEEGPKLVAASQAALGL |
| 107 | HALB114 | artifi- | DAHKSEVAHRFKDLGEENFKALVLIAFAQYLQQCPFEDHVKLVNEVTEFAKTCVADESAENCDKSLHTLFGDKLCTVATL |
| | | cial | RETYGEMADCCAKQEPERNECFLQHKDDNPNLPRLVRPEVDVMCTAFHDNEETFLKKYLYEIARRHPYFYAPELLFFAKR |
| | | | YKAAFTECCQAADKAACLLPKLDELRDEGKASSAKQRLKCASLQKFGERAFKAWAVARLSQRFPKAEFAEVSKLVTDLTK |
| | | | VHTECCHGDLLECADDRADLAKYICENQDSISSKLKECCEKPLLEKSHCIAEVENDEMPADLPSLAADFVESKDVCKNYA |
| | | | EAKDVFLGMFLYEYARRHPDYSVVLLLRLAKTYETTLEKCCAAADPHECYAKVFDEFKPLVEEPQNLIKQNCELFEQLGE |
| | | | YKFQNALLVRYTKKVPQVSTPTLVEVSRNLGKVGSKCCKHPEAKRMPCAEDYLSVVLNQLCVLHEKTPVSDRVTKCCTES |
| | | | LVNRRPCFSALDVDETYVPKEFNAETFTFHADICTLSEKERQIKKQTALVELVKHKPKATKEQLKAVMDDFAAFVEKCCK |
| | | | ADDKETCFAEEGPHLVAASKAALGL |
| 108 | HALB254 | artifi- | DAHKSEVAHRFKDLGEENFKALVLIAFAQYLQQCPFEDHVKLVNEVTEFAKTCVADESAENCDKSLHTLFGDKLCTVATL |
| | | cial | RETYGEMADCCAKQEPERNECFLQHKDDNPNLPRLVRPEVDVMCTAFHDNEETFLKKYLYEIARRHPYFYAPELLFFAKR |
| | | | YKAAFTECCQAADKAACLLPKLDELRDEGKASSAKQRLKCASLQKFGERAFKAWAVARLSQRFPKAEFAEVSKLVTDLTK |
| | | | VHTECCHGDLLECADDRADLAKYICENQDSISSKLKECCEKPLLEKSHCIAEVENDEMPADLPSLAADFVESKDVCKNYA |
| | | | EAKDVFLGMFLYEYARRHPDYSVVLLLRLAKTYETTLEKCCAAADPHECYAKVFDEFKPLVEEPQNLIKQNCELFEQLGE |
| | | | YKFQNALLVRYTKKVPQVSTPTLVEVSRNLGKVGSKCCKHPEAKRMPCAEDYLSVVLNQLCVLHEKTPVSDRVTKCCTES |
| | | | LVNRRPCFSALGVDETYVPKEFNAETFTFHADICTLSEKERQIKKQTALVELVKHKPKATKEQLKAVMDKFAAFVEKCCK |
| | | | ADDKETCFAEEGPKLVAASQAALGL |
| 109 | HALB253 | artifi- | DAHKSEVAHRFKDLGEENFKALVLIAFAQYLQQCPFEDHVKLVNEVTEFAKTCVADESAENCDKSLHTLFGDKLCTVATL |
| | | cial | RETYGEMADCCAKQEPERNECFLQHKDDNPNLPRLVRPEVDVMCTAFHDNEETFLKKYLYEIARRHPYFYAPELLFFAKR |
| | | | YKAAFTECCQAADKAACLLPKLDELRDEGKASSAKQRLKCASLQKFGERAFKAWAVARLSQRFPKAEFAEVSKLVTDLTK |
| | | | VHTECCHGDLLECADDRADLAKYICENQDSISSKLKECCEKPLLEKSHCIAEVENDEMPADLPSLAADFVESKDVCKNYA |
| | | | EAKDVFLGMFLYEYARRHPDYSVVLLLRLAKTYETTLEKCCAAADPHECYAKVFDEFKPLVEEPQNLIKQNCELFEQLGE |
| | | | YKFQNALLVRYTKKVPQVSTPTLVEVSRNLGKVGSKCCKHPEAKRMPCAEDYLSVVLNQLCVLHEKTPVSDRVTKCCTES |
| | | | LVNRRPCFSALDVDETYVPKEFNAETFTFHADICTLSEKERQIKKQTALVELVKHKPKATKEQLKAVMDKFAAFVEKCCK |
| | | | ADDKETCFAEEGPKLVAASQAALGL |
| 110 | HALB131 | artifi- | DAHKSEVAHRFKDLGEENFKALVLIAFAQYLQQCPFEDHVKLVNEVTEFAKTCVADESAENCDKSLHTLFGDKLCTVATL |
| | | cial | RETYGEMADCCAKQEPERNECFLQHKDDNPNLPRLVRPEVDVMCTAFHDNEETFLKKYLYEIARRHPYFYAPELLFFAKR |
| | | | YKAAFTECCQAADKAACLLPKLDELRDEGKASSAKQRLKCASLQKFGERAFKAWAVARLSQRFPKAEFAEVSKLVTDLTK |
| | | | VHTECCHGDLLECADDRADLAKYICENQDSISSKLKECCEKPLLEKSHCIAEVENDEMPADLPSLAADFVESKDVCKNYA |
| | | | EAKDVFLGMFLYEYARRHPDYSVVLLLRLAKTYETTLEKCCAAADPHECYAKVFDEFKPLVEEPQNLIKQNCELFEQLGE |
| | | | YKFQNALLVRYTKKVPQVSTPTLVEVSRNLGKVGSKCCKHPEAKRMPCAEDYLSVVLNQLCVLHEKTPVSDRVTKCCTES |
| | | | LVNRRPCFSALEVDETYVPKEFNAETFTFHADICTLSEKERQIKKQTALVELVKHKPKATKEQLKAVMDKFAAFVEKCCK |
| | | | ADDKETCFAEEGPHLVAASQAALGL |
| 111 | HALB135 | artifi- | DAHKSEVAHRFKDLGEENFKALVLIAFAQYLQQCPFEDHVKLVNEVTEFAKTCVADESAENCDKSLHTLFGDKLCTVATL |
| | | cial | RETYGEMADCCAKQEPERNECFLQHKDDNPNLPRLVRPEVDVMCTAFHDNEETFLKKYLYEIARRHPYFYAPELLFFAKR |
| | | | YKAAFTECCQAADKAACLLPKLDELRDEGKASSAKQRLKCASLQKFGERAFKAWAVARLSQRFPKAEFAEVSKLVTDLTK |
| | | | VHTECCHGDLLECADDRADLAKYICENQDSISSKLKECCEKPLLEKSHCIAEVENDEMPADLPSLAADFVESKDVCKNYA |
| | | | EAKDVFLGMFLYEYARRHPDYSVVLLLRLAKTYETTLEKCCAAADPHECYAKVFDEFKPLVEEPQNLIKQNCELFEQLGE |
| | | | YKFQNALLVRYTKKVPQVSTPTLVEVSRNLGKVGSKCCKHPEAKRMPCAEDYLSVVLNQLCVLHEKTPVSDRVTKCCTES |
| | | | LVNRRPCFSALEVDETYVPKEFNAETFTFHADICTLSEKERQIKKQTALVELVKHKPKATKEQLKAVMDDFAAFVEKCCK |
| | | | ADDKETCFAEEGPHLVAASKAALGL |
| 112 | HALB133 | artifi- | DAHKSEVAHRFKDLGEENFKALVLIAFAQYLQQCPFEDHVKLVNEVTEFAKTCVADESAENCDKSLHTLFGDKLCTVATL |
| | | cial | RETYGEMADCCAKQEPERNECFLQHKDDNPNLPRLVRPEVDVMCTAFHDNEETFLKKYLYEIARRHPYFYAPELLFFAKR |
| | | | YKAAFTECCQAADKAACLLPKLDELRDEGKASSAKQRLKCASLQKFGERAFKAWAVARLSQRFPKAEFAEVSKLVTDLTK |
| | | | VHTECCHGDLLECADDRADLAKYICENQDSISSKLKECCEKPLLEKSHCIAEVENDEMPADLPSLAADFVESKDVCKNYA |
| | | | EAKDVFLGMFLYEYARRHPDYSVVLLLRLAKTYETTLEKCCAAADPHECYAKVFDEFKPLVEEPQNLIKQNCELFEQLGE |
| | | | YKFQNALLVRYTKKVPQVSTPTLVEVSRNLGKVGSKCCKHPEAKRMPCAEDYLSVVLNQLCVLHEKTPVSDRVTKCCTES |
| | | | LVNRRPCFSALEVDETYVPKEFNAETFTFHADICTLSEKERQIKKQTALVELVKHKPKATKEQLKAVMDKFAAFVEKCCK |
| | | | ADDKETCFAEEGPKLVAASKAALGL |
| 113 | HALB234 | artifi- | DAHKSEVAHRFKDLGEENFKALVLIAFAQYLQQCPFEDHVKLVNEVTEFAKTCVADESAENCDKSLHTLFGDKLCTVATL |
| | | cial | RETYGEMADCCAKQEPERNECFLQHKDDNPNLPRLVRPEVDVMCTAFHDNEETFLKKYLYEIARRHPYFYAPELLFFAKR |
| | | | YKAAFTECCQAADKAACLLPKLDELRDEGKASSAKQRLKCASLQKFGERAFKAWAVARLSQRFPKAEFAEVSKLVTDLTK |
| | | | VHTECCHGDLLECADDRADLAKYICENQDSISSKLKECCEKPLLEKSHCIAEVENDEMPADLPSLAADFVESKDVCKNYA |
| | | | EAKDVFLGMFLYEYARRHPDYSVVLLLRLAKTYETTLEKCCAAADPHECYAKVFDEFKPLVEEPQNLIKQNCELFEQLGE |
| | | | YKFQNALLVRYTKKVPQVSTPTLVEVSRNLGKVGSKCCKHPEAKRMPCAEDYLSVVLNQLCVLHEKTPVSDRVTKCCTES |
| | | | LVNRRPCFSALDVDETYVPKEFNAETFTFHADICTLSEKERQIKKQTALVELVKHKPKATKEQLKAVMDDFAAFVEKCCK |
| | | | ADDKETCFAEEGPKLVAASKAALGL |
| 114 | HALB | artifi- | DAHKSEVAHRFKDLGEENFKALVLIAFAQYLQQSPFEDHVKLVNEVTEFAKTCVADESAENCDKSLHTLFGDKLCTVATL |
| | C34S | cial | RETYGEMADCCAKQEPERNECFLQHKDDNPNLPRLVRPEVDVMCTAFHDNEETFLKKYLYEIARRHPYFYAPELLFFAKR |
| | | | YKAAFTECCQAADKAACLLPKLDELRDEGKASSAKQRLKCASLQKFGERAFKAWAVARLSQRFPKAEFAEVSKLVTDLTK |
| | | | VHTECCHGDLLECADDRADLAKYICENQDSISSKLKECCEKPLLEKSHCIAEVENDEMPADLPSLAADFVESKDVCKNYA |
| | | | EAKDVFLGMFLYEYARRHPDYSVVLLLRLAKTYETTLEKCCAAADPHECYAKVFDEFKPLVEEPQNLIKQNCELFEQLGE |
| | | | YKFQNALLVRYTKKVPQVSTPTLVEVSRNLGKVGSKCCKHPEAKRMPCAEDYLSVVLNQLCVLHEKTPVSDRVTKCCTES |
| | | | LVNRRPCFSALEVDETYVPKEFNAETFTFHADICTLSEKERQIKKQTALVELVKHKPKATKEQLKAVMDDFAAFVEKCCK |
| | | | ADDKETCFAEEGKKLVAASQAALGL |
| 115 | HALB7 | artifi- | DAHKSEVAHRFKDLGEENFKALVLIAFAQYLQQSPFEDHVKLVNEVTEFAKTCVADESAENCDKSLHTLFGDKLCTVATL |
| | C34S | cial | RETYGEMADCCAKQEPERNECFLQHKDDNPNLPRLVRPEVDVMCTAFHDNEETFLKKYLYEIARRHPYFYAPELLFFAKR |
| | | | YKAAFTECCQAADKAACLLPKLDELRDEGKASSAKQRLKCASLQKFGERAFKAWAVARLSQRFPKAEFAEVSKLVTDLTK |
| | | | VHTECCHGDLLECADDRADLAKYICENQDSISSKLKECCEKPLLEKSHCIAEVENDEMPADLPSLAADFVESKDVCKNYA |
| | | | EAKDVFLGMFLYEYARRHPDYSVVLLLRLAKTYETTLEKCCAAADPHECYAKVFDEFKPLVEEPQNLIKQNCELFEQLGE |
| | | | YKFQNALLVRYTKKVPQVSTPTLVEVSRNLGKVGSKCCKHPEAKRMPCAEDYLSVVLNQLCVLHEKTPVSDRVTKCCTES |
| | | | LVNRRPCFSALEVDETYVPKEFNAGTFTFHADICTLSEKERQIKKQTALVELVKHKPKATKEQLKAAMDDFAAFVEKCCK |
| | | | ADDKETCFAEEGKKLVAASQAALGL |
| 116 | HALB098 | artifi- | DAHKSEVAHRFKDLGEENFKALVLIAFAQYLQQSPFEDHVKLVNEVTEFAKTCVADESAENCDKSLHTLFGDKLCTVATL |
| | C34S | cial | RETYGEMADCCAKQEPERNECFLQHKDDNPNLPRLVRPEVDVMCTAFHDNEETFLKKYLYEIARRHPYFYAPELLFFAKR |
| | | | YKAAFTECCQAADKAACLLPKLDELRDEGKASSAKQRLKCASLQKFGERAFKAWAVARLSQRFPKAEFAEVSKLVTDLTK |
| | | | VHTECCHGDLLECADDRADLAKYICENQDSISSKLKECCEKPLLEKSHCIAEVENDEMPADLPSLAADFVESKDVCKNYA |
| | | | EAKDVFLGMFLYEYARRHPDYSVVLLLRLAKTYETTLEKCCAAADPHECYAKVFDEFKPLVEEPQNLIKQNCELFEQLGE |
| | | | YKFQNALLVRYTKKVPQVSTPTLVEVSRNLGKVGSKCCKHPEAKRMPCAEDYLSVVLNQLCVLHEKTPVSDRVTKCCTES |
| | | | LVNRRPCFSALEVDETYVPKEFNAETFTFHADICTLSEKERQIKKQTALVELVKHKPKATKEQLKAVMDDFAAFVEKCCK |
| | | | ADDKETCFAEEGPKLVAASQAALGL |
| 117 | HALB114 | artifi- | DAHKSEVAHRFKDLGEENFKALVLIAFAQYLQQSPFEDHVKLVNEVTEFAKTCVADESAENCDKSLHTLFGDKLCTVATL |
| | C34S | cial | RETYGEMADCCAKQEPERNECFLQHKDDNPNLPRLVRPEVDVMCTAFHDNEETFLKKYLYEIARRHPYFYAPELLFFAKR |
| | | | YKAAFTECCQAADKAACLLPKLDELRDEGKASSAKQRLKCASLQKFGERAFKAWAVARLSQRFPKAEFAEVSKLVTDLTK |
| | | | VHTECCHGDLLECADDRADLAKYICENQDSISSKLKECCEKPLLEKSHCIAEVENDEMPADLPSLAADFVESKDVCKNYA |
| | | | EAKDVFLGMFLYEYARRHPDYSVVLLLRLAKTYETTLEKCCAAADPHECYAKVFDEFKPLVEEPQNLIKQNCELFEQLGE |
| | | | YKFQNALLVRYTKKVPQVSTPTLVEVSRNLGKVGSKCCKHPEAKRMPCAEDYLSVVLNQLCVLHEKTPVSDRVTKCCTES |
| | | | LVNRRPCFSALDVDETYVPKEFNAETFTFHADICTLSEKERQIKKQTALVELVKHKPKATKEQLKAVMDDFAAFVEKCCK |
| | | | ADDKETCFAEEGPHLVAASKAALGL |
| 118 | HALB254 | artifi- | DAHKSEVAHRFKDLGEENFKALVLIAFAQYLQQSPFEDHVKLVNEVTEFAKTCVADESAENCDKSLHTLFGDKLCTVATL |
| | C34S | cial | RETYGEMADCCAKQEPERNECFLQHKDDNPNLPRLVRPEVDVMCTAFHDNEETFLKKYLYEIARRHPYFYAPELLFFAKR |
| | | | YKAAFTECCQAADKAACLLPKLDELRDEGKASSAKQRLKCASLQKFGERAFKAWAVARLSQRFPKAEFAEVSKLVTDLTK |
| | | | VHTECCHGDLLECADDRADLAKYICENQDSISSKLKECCEKPLLEKSHCIAEVENDEMPADLPSLAADFVESKDVCKNYA |
| | | | EAKDVFLGMFLYEYARRHPDYSVVLLLRLAKTYETTLEKCCAAADPHECYAKVFDEFKPLVEEPQNLIKQNCELFEQLGE |
| | | | YKFQNALLVRYTKKVPQVSTPTLVEVSRNLGKVGSKCCKHPEAKRMPCAEDYLSVVLNQLCVLHEKTPVSDRVTKCCTES |
| | | | LVNRRPCFSALGVDETYVPKEFNAETFTFHADICTLSEKERQIKKQTALVELVKHKPKATKEQLKAVMDKFAAFVEKCCK |
| | | | ADDKETCFAEEGPKLVAASQAALGL |
| 119 | HALB253 | artifi- | DAHKSEVAHRFKDLGEENFKALVLIAFAQYLQQSPFEDHVKLVNEVTEFAKTCVADESAENCDKSLHTLFGDKLCTVATL |
| | C34S | cial | RETYGEMADCCAKQEPERNECFLQHKDDNPNLPRLVRPEVDVMCTAFHDNEETFLKKYLYEIARRHPYFYAPELLFFAKR |
| | | | YKAAFTECCQAADKAACLLPKLDELRDEGKASSAKQRLKCASLQKFGERAFKAWAVARLSQRFPKAEFAEVSKLVTDLTK |
| | | | VHTECCHGDLLECADDRADLAKYICENQDSISSKLKECCEKPLLEKSHCIAEVENDEMPADLPSLAADFVESKDVCKNYA |
| | | | EAKDVFLGMFLYEYARRHPDYSVVLLLRLAKTYETTLEKCCAAADPHECYAKVFDEFKPLVEEPQNLIKQNCELFEQLGE |
| | | | YKFQNALLVRYTKKVPQVSTPTLVEVSRNLGKVGSKCCKHPEAKRMPCAEDYLSVVLNQLCVLHEKTPVSDRVTKCCTES |
| | | | LVNRRPCFSALDVDETYVPKEFNAETFTFHADICTLSEKERQIKKQTALVELVKHKPKATKEQLKAVMDKFAAFVEKCCK |
| | | | ADDKETCFAEEGPKLVAASQAALGL |
| 120 | HALB131 | artifi- | DAHKSEVAHRFKDLGEENFKALVLIAFAQYLQQSPFEDHVKLVNEVTEFAKTCVADESAENCDKSLHTLFGDKLCTVATL |
| | C34S | cial | RETYGEMADCCAKQEPERNECFLQHKDDNPNLPRLVRPEVDVMCTAFHDNEETFLKKYLYEIARRHPYFYAPELLFFAKR |
| | | | YKAAFTECCQAADKAACLLPKLDELRDEGKASSAKQRLKCASLQKFGERAFKAWAVARLSQRFPKAEFAEVSKLVTDLTK |
| | | | VHTECCHGDLLECADDRADLAKYICENQDSISSKLKECCEKPLLEKSHCIAEVENDEMPADLPSLAADFVESKDVCKNYA |
| | | | EAKDVFLGMFLYEYARRHPDYSVVLLLRLAKTYETTLEKCCAAADPHECYAKVFDEFKPLVEEPQNLIKQNCELFEQLGE |
| | | | YKFQNALLVRYTKKVPQVSTPTLVEVSRNLGKVGSKCCKHPEAKRMPCAEDYLSVVLNQLCVLHEKTPVSDRVTKCCTES |
| | | | LVNRRPCFSALEVDETYVPKEFNAETFTFHADICTLSEKERQIKKQTALVELVKHKPKATKEQLKAVMDKFAAFVEKCCK |
| | | | ADDKETCFAEEGPHLVAASQAALGL |
| 121 | HALB135 | artifi- | DAHKSEVAHRFKDLGEENFKALVLIAFAQYLQQSPFEDHVKLVNEVTEFAKTCVADESAENCDKSLHTLFGDKLCTVATL |
| | C34S | cial | RETYGEMADCCAKQEPERNECFLQHKDDNPNLPRLVRPEVDVMCTAFHDNEETFLKKYLYEIARRHPYFYAPELLFFAKR |
| | | | YKAAFTECCQAADKAACLLPKLDELRDEGKASSAKQRLKCASLQKFGERAFKAWAVARLSQRFPKAEFAEVSKLVTDLTK |
| | | | VHTECCHGDLLECADDRADLAKYICENQDSISSKLKECCEKPLLEKSHCIAEVENDEMPADLPSLAADFVESKDVCKNYA |
| | | | EAKDVFLGMFLYEYARRHPDYSVVLLLRLAKTYETTLEKCCAAADPHECYAKVFDEFKPLVEEPQNLIKQNCELFEQLGE |
| | | | YKFQNALLVRYTKKVPQVSTPTLVEVSRNLGKVGSKCCKHPEAKRMPCAEDYLSVVLNQLCVLHEKTPVSDRVTKCCTES |
| | | | LVNRRPCFSALEVDETYVPKEFNAETFTFHADICTLSEKERQIKKQTALVELVKHKPKATKEQLKAVMDDFAAFVEKCCK |
| | | | ADDKETCFAEEGPHLVAASKAALGL |
| 122 | HALB133 | artifi- | DAHKSEVAHRFKDLGEENFKALVLIAFAQYLQQSPFEDHVKLVNEVTEFAKTCVADESAENCDKSLHTLFGDKLCTVATL |
| | C34S | cial | RETYGEMADCCAKQEPERNECFLQHKDDNPNLPRLVRPEVDVMCTAFHDNEETFLKKYLYEIARRHPYFYAPELLFFAKR |
| | | | YKAAFTECCQAADKAACLLPKLDELRDEGKASSAKQRLKCASLQKFGERAFKAWAVARLSQRFPKAEFAEVSKLVTDLTK |
| | | | VHTECCHGDLLECADDRADLAKYICENQDSISSKLKECCEKPLLEKSHCIAEVENDEMPADLPSLAADFVESKDVCKNYA |
| | | | EAKDVFLGMFLYEYARRHPDYSVVLLLRLAKTYETTLEKCCAAADPHECYAKVFDEFKPLVEEPQNLIKQNCELFEQLGE |
| | | | YKFQNALLVRYTKKVPQVSTPTLVEVSRNLGKVGSKCCKHPEAKRMPCAEDYLSVVLNQLCVLHEKTPVSDRVTKCCTES |
| | | | LVNRRPCFSALEVDETYVPKEFNAETFTFHADICTLSEKERQIKKQTALVELVKHKPKATKEQLKAVMDKFAAFVEKCCK |
| | | | ADDKETCFAEEGPKLVAASKAALGL |
| 123 | HALB234 | artifi- | DAHKSEVAHRFKDLGEENFKALVLIAFAQYLQQSPFEDHVKLVNEVTEFAKTCVADESAENCDKSLHTLFGDKLCTVATL |
| | C34S | cial | RETYGEMADCCAKQEPERNECFLQHKDDNPNLPRLVRPEVDVMCTAFHDNEETFLKKYLYEIARRHPYFYAPELLFFAKR |
| | | | YKAAFTECCQAADKAACLLPKLDELRDEGKASSAKQRLKCASLQKFGERAFKAWAVARLSQRFPKAEFAEVSKLVTDLTK |
| | | | VHTECCHGDLLECADDRADLAKYICENQDSISSKLKECCEKPLLEKSHCIAEVENDEMPADLPSLAADFVESKDVCKNYA |
| | | | EAKDVFLGMFLYEYARRHPDYSVVLLLRLAKTYETTLEKCCAAADPHECYAKVFDEFKPLVEEPQNLIKQNCELFEQLGE |
| | | | YKFQNALLVRYTKKVPQVSTPTLVEVSRNLGKVGSKCCKHPEAKRMPCAEDYLSVVLNQLCVLHEKTPVSDRVTKCCTES |
| | | | LVNRRPCFSALDVDETYVPKEFNAETFTFHADICTLSEKERQIKKQTALVELVKHKPKATKEQLKAVMDDFAAFVEKCCK |
| | | | ADDKETCFAEEGPKLVAASKAALGL |
| 124 | HALB | artifi- | DAHKSEVAHRFKDLGEENFKALVLIAFAQYLQQAPFEDHVKLVNEVTEFAKTCVADESAENCDKSLHTLFGDKLCTVATL |
| | C34A | cial | RETYGEMADCCAKQEPERNECFLQHKDDNPNLPRLVRPEVDVMCTAFHDNEETFLKKYLYEIARRHPYFYAPELLFFAKR |
| | | | YKAAFTECCQAADKAACLLPKLDELRDEGKASSAKQRLKCASLQKFGERAFKAWAVARLSQRFPKAEFAEVSKLVTDLTK |
| | | | VHTECCHGDLLECADDRADLAKYICENQDSISSKLKECCEKPLLEKSHCIAEVENDEMPADLPSLAADFVESKDVCKNYA |
| | | | EAKDVFLGMFLYEYARRHPDYSVVLLLRLAKTYETTLEKCCAAADPHECYAKVFDEFKPLVEEPQNLIKQNCELFEQLGE |
| | | | YKFQNALLVRYTKKVPQVSTPTLVEVSRNLGKVGSKCCKHPEAKRMPCAEDYLSVVLNQLCVLHEKTPVSDRVTKCCTES |
| | | | LVNRRPCFSALEVDETYVPKEFNAETFTFHADICTLSEKERQIKKQTALVELVKHKPKATKEQLKAVMDDFAAFVEKCCK |
| | | | ADDKETCFAEEGKKLVAASQAALGL |
| 125 | HALB7 | artifi- | DAHKSEVAHRFKDLGEENFKALVLIAFAQYLQQAPFEDHVKLVNEVTEFAKTCVADESAENCDKSLHTLFGDKLCTVATL |
| | C34A | cial | RETYGEMADCCAKQEPERNECFLQHKDDNPNLPRLVRPEVDVMCTAFHDNEETFLKKYLYEIARRHPYFYAPELLFFAKR |
| | | | YKAAFTECCQAADKAACLLPKLDELRDEGKASSAKQRLKCASLQKFGERAFKAWAVARLSQRFPKAEFAEVSKLVTDLTK |
| | | | VHTECCHGDLLECADDRADLAKYICENQDSISSKLKECCEKPLLEKSHCIAEVENDEMPADLPSLAADFVESKDVCKNYA |
| | | | EAKDVFLGMFLYEYARRHPDYSVVLLLRLAKTYETTLEKCCAAADPHECYAKVFDEFKPLVEEPQNLIKQNCELFEQLGE |
| | | | YKFQNALLVRYTKKVPQVSTPTLVEVSRNLGKVGSKCCKHPEAKRMPCAEDYLSVVLNQLCVLHEKTPVSDRVTKCCTES |
| | | | LVNRRPCFSALEVDETYVPKEFNAGTFTFHADICTLSEKERQIKKQTALVELVKHKPKATKEQLKAAMDDFAAFVEKCCK |
| | | | ADDKETCFAEEGKKLVAASQAALGL |
| 126 | HALB098 | artifi- | DAHKSEVAHRFKDLGEENFKALVLIAFAQYLQQAPFEDHVKLVNEVTEFAKTCVADESAENCDKSLHTLFGDKLCTVATL |
| | C34A | cial | RETYGEMADCCAKQEPERNECFLQHKDDNPNLPRLVRPEVDVMCTAFHDNEETFLKKYLYEIARRHPYFYAPELLFFAKR |
| | | | YKAAFTECCQAADKAACLLPKLDELRDEGKASSAKQRLKCASLQKFGERAFKAWAVARLSQRFPKAEFAEVSKLVTDLTK |
| | | | VHTECCHGDLLECADDRADLAKYICENQDSISSKLKECCEKPLLEKSHCIAEVENDEMPADLPSLAADFVESKDVCKNYA |
| | | | EAKDVFLGMFLYEYARRHPDYSVVLLLRLAKTYETTLEKCCAAADPHECYAKVFDEFKPLVEEPQNLIKQNCELFEQLGE |
| | | | YKFQNALLVRYTKKVPQVSTPTLVEVSRNLGKVGSKCCKHPEAKRMPCAEDYLSVVLNQLCVLHEKTPVSDRVTKCCTES |
| | | | LVNRRPCFSALEVDETYVPKEFNAETFTFHADICTLSEKERQIKKQTALVELVKHKPKATKEQLKAVMDDFAAFVEKCCK |
| | | | ADDKETCFAEEGPKLVAASQAALGL |
| 127 | HALB114 | artifi- | DAHKSEVAHRFKDLGEENFKALVLIAFAQYLQQAPFEDHVKLVNEVTEFAKTCVADESAENCDKSLHTLFGDKLCTVATL |
| | C34A | cial | RETYGEMADCCAKQEPERNECFLQHKDDNPNLPRLVRPEVDVMCTAFHDNEETFLKKYLYEIARRHPYFYAPELLFFAKR |
| | | | YKAAFTECCQAADKAACLLPKLDELRDEGKASSAKQRLKCASLQKFGERAFKAWAVARLSQRFPKAEFAEVSKLVTDLTK |
| | | | VHTECCHGDLLECADDRADLAKYICENQDSISSKLKECCEKPLLEKSHCIAEVENDEMPADLPSLAADFVESKDVCKNYA |
| | | | EAKDVFLGMFLYEYARRHPDYSVVLLLRLAKTYETTLEKCCAAADPHECYAKVFDEFKPLVEEPQNLIKQNCELFEQLGE |
| | | | YKFQNALLVRYTKKVPQVSTPTLVEVSRNLGKVGSKCCKHPEAKRMPCAEDYLSVVLNQLCVLHEKTPVSDRVTKCCTES |
| | | | LVNRRPCFSALDVDETYVPKEFNAETFTFHADICTLSEKERQIKKQTALVELVKHKPKATKEQLKAVMDDFAAFVEKCCK |
| | | | ADDKETCFAEEGPHLVAASKAALGL |
| 128 | HALB254 | artifi- | DAHKSEVAHRFKDLGEENFKALVLIAFAQYLQQAPFEDHVKLVNEVTEFAKTCVADESAENCDKSLHTLFGDKLCTVATL |
| | C34A | cial | RETYGEMADCCAKQEPERNECFLQHKDDNPNLPRLVRPEVDVMCTAFHDNEETFLKKYLYEIARRHPYFYAPELLFFAKR |
| | | | YKAAFTECCQAADKAACLLPKLDELRDEGKASSAKQRLKCASLQKFGERAFKAWAVARLSQRFPKAEFAEVSKLVTDLTK |
| | | | VHTECCHGDLLECADDRADLAKYICENQDSISSKLKECCEKPLLEKSHCIAEVENDEMPADLPSLAADFVESKDVCKNYA |
| | | | EAKDVFLGMFLYEYARRHPDYSVVLLLRLAKTYETTLEKCCAAADPHECYAKVFDEFKPLVEEPQNLIKQNCELFEQLGE |
| | | | YKFQNALLVRYTKKVPQVSTPTLVEVSRNLGKVGSKCCKHPEAKRMPCAEDYLSVVLNQLCVLHEKTPVSDRVTKCCTES |
| | | | LVNRRPCFSALGVDETYVPKEFNAETFTFHADICTLSEKERQIKKQTALVELVKHKPKATKEQLKAVMDKFAAFVEKCCK |
| | | | ADDKETCFAEEGPKLVAASQAALGL |
| 129 | HALB253 | artifi- | DAHKSEVAHRFKDLGEENFKALVLIAFAQYLQQAPFEDHVKLVNEVTEFAKTCVADESAENCDKSLHTLFGDKLCTVATL |
| | C34A | cial | RETYGEMADCCAKQEPERNECFLQHKDDNPNLPRLVRPEVDVMCTAFHDNEETFLKKYLYEIARRHPYFYAPELLFFAKR |
| | | | YKAAFTECCQAADKAACLLPKLDELRDEGKASSAKQRLKCASLQKFGERAFKAWAVARLSQRFPKAEFAEVSKLVTDLTK |
| | | | VHTECCHGDLLECADDRADLAKYICENQDSISSKLKECCEKPLLEKSHCIAEVENDEMPADLPSLAADFVESKDVCKNYA |
| | | | EAKDVFLGMFLYEYARRHPDYSVVLLLRLAKTYETTLEKCCAAADPHECYAKVFDEFKPLVEEPQNLIKQNCELFEQLGE |
| | | | YKFQNALLVRYTKKVPQVSTPTLVEVSRNLGKVGSKCCKHPEAKRMPCAEDYLSVVLNQLCVLHEKTPVSDRVTKCCTES |
| | | | LVNRRPCFSALDVDETYVPKEFNAETFTFHADICTLSEKERQIKKQTALVELVKHKPKATKEQLKAVMDKFAAFVEKCCK |
| | | | ADDKETCFAEEGPKLVAASQAALGL |
| 130 | HALB131 | artifi- | DAHKSEVAHRFKDLGEENFKALVLIAFAQYLQQAPFEDHVKLVNEVTEFAKTCVADESAENCDKSLHTLFGDKLCTVATL |
| | C34A | cial | RETYGEMADCCAKQEPERNECFLQHKDDNPNLPRLVRPEVDVMCTAFHDNEETFLKKYLYEIARRHPYFYAPELLFFAKR |
| | | | YKAAFTECCQAADKAACLLPKLDELRDEGKASSAKQRLKCASLQKFGERAFKAWAVARLSQRFPKAEFAEVSKLVTDLTK |
| | | | VHTECCHGDLLECADDRADLAKYICENQDSISSKLKECCEKPLLEKSHCIAEVENDEMPADLPSLAADFVESKDVCKNYA |
| | | | EAKDVFLGMFLYEYARRHPDYSVVLLLRLAKTYETTLEKCCAAADPHECYAKVFDEFKPLVEEPQNLIKQNCELFEQLGE |
| | | | YKFQNALLVRYTKKVPQVSTPTLVEVSRNLGKVGSKCCKHPEAKRMPCAEDYLSVVLNQLCVLHEKTPVSDRVTKCCTES |
| | | | LVNRRPCFSALEVDETYVPKEFNAETFTFHADICTLSEKERQIKKQTALVELVKHKPKATKEQLKAVMDKFAAFVEKCCK |
| | | | ADDKETCFAEEGPHLVAASQAALGL |
| 131 | HALB135 | artifi- | DAHKSEVAHRFKDLGEENFKALVLIAFAQYLQQAPFEDHVKLVNEVTEFAKTCVADESAENCDKSLHTLFGDKLCTVATL |
| | C34A | cial | RETYGEMADCCAKQEPERNECFLQHKDDNPNLPRLVRPEVDVMCTAFHDNEETFLKKYLYEIARRHPYFYAPELLFFAKR |
| | | | YKAAFTECCQAADKAACLLPKLDELRDEGKASSAKQRLKCASLQKFGERAFKAWAVARLSQRFPKAEFAEVSKLVTDLTK |
| | | | VHTECCHGDLLECADDRADLAKYICENQDSISSKLKECCEKPLLEKSHCIAEVENDEMPADLPSLAADFVESKDVCKNYA |
| | | | EAKDVFLGMFLYEYARRHPDYSVVLLLRLAKTYETTLEKCCAAADPHECYAKVFDEFKPLVEEPQNLIKQNCELFEQLGE |
| | | | YKFQNALLVRYTKKVPQVSTPTLVEVSRNLGKVGSKCCKHPEAKRMPCAEDYLSVVLNQLCVLHEKTPVSDRVTKCCTES |
| | | | LVNRRPCFSALEVDETYVPKEFNAETFTFHADICTLSEKERQIKKQTALVELVKHKPKATKEQLKAVMDDFAAFVEKCCK |
| | | | ADDKETCFAEEGPHLVAASKAALGL |
| 132 | HALB133 | artifi- | DAHKSEVAHRFKDLGEENFKALVLIAFAQYLQQAPFEDHVKLVNEVTEFAKTCVADESAENCDKSLHTLFGDKLCTVATL |
| | C34A | cial | RETYGEMADCCAKQEPERNECFLQHKDDNPNLPRLVRPEVDVMCTAFHDNEETFLKKYLYEIARRHPYFYAPELLFFAKR |
| | | | YKAAFTECCQAADKAACLLPKLDELRDEGKASSAKQRLKCASLQKFGERAFKAWAVARLSQRFPKAEFAEVSKLVTDLTK |
| | | | VHTECCHGDLLECADDRADLAKYICENQDSISSKLKECCEKPLLEKSHCIAEVENDEMPADLPSLAADFVESKDVCKNYA |
| | | | EAKDVFLGMFLYEYARRHPDYSVVLLLRLAKTYETTLEKCCAAADPHECYAKVFDEFKPLVEEPQNLIKQNCELFEQLGE |
| | | | YKFQNALLVRYTKKVPQVSTPTLVEVSRNLGKVGSKCCKHPEAKRMPCAEDYLSVVLNQLCVLHEKTPVSDRVTKCCTES |
| | | | LVNRRPCFSALEVDETYVPKEFNAETFTFHADICTLSEKERQIKKQTALVELVKHKPKATKEQLKAVMDKFAAFVEKCCK |
| | | | ADDKETCFAEEGPKLVAASKAALGL |
| 133 | HALB234 | artifi- | DAHKSEVAHRFKDLGEENFKALVLIAFAQYLQQAPFEDHVKLVNEVTEFAKTCVADESAENCDKSLHTLFGDKLCTVATL |
| | C34A | cial | RETYGEMADCCAKQEPERNECFLQHKDDNPNLPRLVRPEVDVMCTAFHDNEETFLKKYLYEIARRHPYFYAPELLFFAKR |
| | | | YKAAFTECCQAADKAACLLPKLDELRDEGKASSAKQRLKCASLQKFGERAFKAWAVARLSQRFPKAEFAEVSKLVTDLTK |
| | | | VHTECCHGDLLECADDRADLAKYICENQDSISSKLKECCEKPLLEKSHCIAEVENDEMPADLPSLAADFVESKDVCKNYA |
| | | | EAKDVFLGMFLYEYARRHPDYSVVLLLRLAKTYETTLEKCCAAADPHECYAKVFDEFKPLVEEPQNLIKQNCELFEQLGE |
| | | | YKFQNALLVRYTKKVPQVSTPTLVEVSRNLGKVGSKCCKHPEAKRMPCAEDYLSVVLNQLCVLHEKTPVSDRVTKCCTES |
| | | | LVNRRPCFSALDVDETYVPKEFNAETFTFHADICTLSEKERQIKKQTALVELVKHKPKATKEQLKAVMDDFAAFVEKCCK |
| | | | ADDKETCFAEEGPKLVAASKAALGL |
| 134 | Ab156 | artifi- | RDWDFDVFGGGTPVGG |
| | | cial | |
| 135 | linear | artifi- | QRFVTGHFGGLXPANG |
| | FcRn | cial | |
| | binding | | |
| | peptide | | |
| 136 | linear | artifi- | QRFVTGHFGGLYPANG |
| | FcRn | cial | |
| | binding | | |
| | peptide | | |
| | Y | | |
| 137 | linear | artifi- | QRFVTGHFGGLHPANG |
| | FcRn | cial | |
| | binding | | |
| | peptide | | |
| | H | | |
| 138 | core | artifi- | TGHFGGLHP |
| | FcRn | cial | |
| | binding | | |
| | peptide | | |
| | H | | |
| 139 | cyclic | artifi- | QRFCTGHFGGLHPCNG |
| | FcRn | cial | |
| | binding | | |
| | peptide | | |
| | H | | |
| 140 | Cross | | ASTKGPSVFPLAPSSKSTSGGTAALGCLVKDYFPEPVTVSWNSGALTSGVHTFPAVLQSSGLYSLSSVVTVPSSSLGTQT |
| | body | | YICNVNHKPSNTKVDKKVEPKSCDKTHTCPPCPAPELLGGPSVFLFPPKPKDTLMISRTPEVTCVVVDVSHEDPEVKFNW |
| | 1 HC | | YVDGVEVHNAKTKPCEEQYGSTYRCVSVLTVLHQDWLNGKEYKCKVSNKALPAPIEKTISKAKGQPREPQVYTLPPSREE |
| | | | MTKNQVSLTCLVKGFYPSDIAVEWESNGQPENNYDTTPPVLDSDGSFFLYSDLTVDKSRWQQGNVFSCSVMHEALHNHYT |
| | | | QKSLSLSPGK |
| 141 | Cross | | GQPKAAPSVTLFPPSSEELQANKATLVCLISDFYPGAVTVAWKADSSPVKAGVETTTPSKQSNNKYAASSYLSLTPEQWK |
| | body | | SHRSYSCQVTHEGSTVEKTVAPTECSDKTHTCPPCPAPELLGGPSVFLFPPKPKDTLMISRTPEVTCVVVDVSHEDPEVK |
| | 1 LC | | FNWYVDGVEVHNAKTKPCEEQYGSTYRCVSVLTVLHQDWLNGKEYKCKVSNKALPAPIEKTISKAKGQPREPQVYTLPPS |
| | | | RKEMTKNQVSLTCLVKGFYPSDIAVEWESNGQPENNYKTTPPVLKSDGSFFLYSKLTVDKSRWQQGNVFSCSVMHEALHN |
| | | | HYTQKSLSLSPGK |
| 142 | Cross | | ASTKGPSVFPLAPCSRSTSESTAALGCLVKDYFPEPVTVSWNSGALTSGVHTFPAVLQSSGLYSLSSVVTVPSSNFGTQT |
| | body | | YTCNVDHKPSNTKVDKTVEPKSSDKTHTCPPCPAPEAAGGPSVFLFPPKPKDTLMISRTPEVTCVVVDVSHEDPEVKFNW |
| | 2 HC | | YVDGVEVHNAKTKPREEQYNSTYRVVSVLTVLHQDWLNGKEYKCKVSNKALPAPIEKTISKAKGQPREPQVYTLPPSREE |
| | | | MTKNQVSLTCLVKGFYPSDIAVEWESNGQPENNYDTTPPVLDSDGSFFLYSDLTVDKSRWQQGNVFSCSVMHEALHNHYT |
| | | | QKSLSLSPGK |
| 143 | Cross | | GQPKAAPSVTLFPPSSEELQANKATLVCLISDFYPGAVTVAWKADSSPVKAGVETTTPSKQSNNKYAASSYLSLTPEQWK |
| | body | | SHRSYSCQVTHEGSTVEKTVAPTECSEPKSSDKTHTCPPCPAPEAAGGPSVFLFPPKPKDTLMISRTPEVTCVVVDVSHE |
| | 2 LC | | DPEVKFNWYVDGVEVHNAKTKPREEQYNSTYRVVSVLTVLHQDWLNGKEYKCKVSNKALPAPIEKTISKAKGQPREPQVY |
| | | | TLPPSRKEMTKNQVSLTCLVKGFYPSDIAVEWESNGQPENNYKTTPPVLKSDGSFFLYSKLTVDKSRWQQGNVFSCSVMH |
| | | | EALHNHYTQKSLSLSPGK |
| 144 | Hetero- | | DKTHTCPPCPAPELLGGPSVFLFPPKPKDTLMISRTPEVTCVVVDVSHEDPEVKFNWYVDGVEVHNAKTKPCEEQYGSTY |
| | Fc | | RCVSVLTVLHQDWLNGKEYKCKVSNKALPAPIEKTISKAKGQPREPQVYTLPPSRKEMTKNQVSLTCLVKGFYPSDIAVE |
| | binder | | WESNGQPENNYKTTPPVLKSDGSFFLYSKLTVDKSRWQQGNVFSCSVMHEALHNHYTQKSLSLSPGK |
| | Fc | | |
| 145 | Hetero- | | DKTHTCPPCPAPELLGGPSVFLFPPKPKDTLMISRTPEVTCVVVDVSHEDPEVKFNWYVDGVEVHNAKTKPCEEQYGSTY |
| | Fc | | RCVSVLTVLHQDWLNGKEYKCKVSNKALPAPIEKTISKAKGQPREPQVYTLPPSREEMTKNQVSLTCLVKGFYPSDIAVE |
| | partner | | WESNGQPENNYDTTPPVLDSDGSFFLYSDLTVDKSRWQQGNVFSCSVMHEALHNHYTQKSLSLSPGK |
| | Fc | | |
| 146 | Maxi- | | EPKSSDKTHTCPPCPAPELLGGPSVFLFPPKPKDTLMISRTPEVTCVVVDVSHEDPEVKFNWYVDGVEVHNAKTKPCEEQ |
| | body 1 | | YGSTYRCVSVLTVLHQDWLNGKEYKCKVSNKALPAPIEKTISKAKGQPREPQVYTLPPSRKEMTKNQVSLTCLVKGFYPS |
| | target | | DIAVEWESNGQPENNYKTTPPVLKSDGSFFLYSKLTVDKSRWQQGNVFSCSVMHEALHNHYTQKSLSLSPGK |
| | Fc | | |
| 147 | Maxi- | | EPKSSDKTHTCPPCPAPELLGGPSVFLFPPKPKDTLMISRTPEVTCVVVDVSHEDPEVKFNWYVDGVEVHNAKTKPCEEQ |
| | body 1 | | YGSTYRCVSVLTVLHQDWLNGKEYKCKVSNKALPAPIEKTISKAKGQPREPQVYTLPPSREEMTKNQVSLTCLVKGFYPS |
| | CD3 Fc | | DIAVEWESNGQPENNYDTTPPVLDSDGSFFLYSDLTVDKSRWQQGNVFSCSVMHEALHNHYTQKSLSLSPGK |
| 148 | Maxi- | | EPKSSDKTHTCPPCPAPEAAGGPSVFLFPPKPKDTLMISRTPEVTCVVVDVSHEDPEVKFNWYVDGVEVHNAKTKPREEQ |
| | body 2 | | YNSTYRVVSVLTVLHQDWLNGKEYKCKVSNKALPAPIEKTISKAKGQPREPQVYTLPPSRKEMTKNQVSLTCLVKGFYPS |
| | target | | DIAVEWESNGQPENNYKTTPPVLKSDGSFFLYSKLTVDKSRWQQGNVFSCSVMHEALHNHYTQKSLSLSPGK |
| | Fc | | |
| 149 | Maxi- | | EPKSSDKTHTCPPCPAPEAAGGPSVFLFPPKPKDTLMISRTPEVTCVVVDVSHEDPEVKFNWYVDGVEVHNAKTKPREEQ |
| | body 2 | | YNSTYRVVSVLTVLHQDWLNGKEYKCKVSNKALPAPIEKTISKAKGQPREPQVYTLPPSREEMTKNQVSLTCLVKGFYPS |
| | CD3 Fc | | DIAVEWESNGQPENNYDTTPPVLDSDGSFFLYSDLTVDKSRWQQGNVFSCSVMHEALHNHYTQKSLSLSPGK |
| 150 | Mono | | APELLGGPSVFLFPPKPKDTLMISRTPEVTCVVVDVSHEDPEVKFNWYVDGVEVHNAKTKPREEQYNSTYRVVSVLTVLH |
| | Fc | | QDWLNGKEYKCKVSNKALPAPIEKTISKAKGQPREPQVTTLPPSREEMTKNQVSLTCLVKGFYPSDIAVEWESNGQPENN |
| | | | YDTTPPVLDSDGSFFLYSDLTVDKSRWQQGNVFSCSVMHEALHNHYTQKSLSLSPGK |
| 151 | FL_1 | VH CDR1 | NARMGVS |
| 152 | FL_1 | VH CDR2 | HIFSNAEKSYRTSLKS |
| 153 | FL_1 | VH CDR3 | IPGYGGNGDYHYYGMDV |
| 154 | FL_1 | VL CDR1 | RASQGIRNDLG |
| 155 | FL_1 | VL CDR2 | ASSTLQS |
| 156 | FL_1 | VL CDR3 | LQHNNFPWT |
| 157 | FL_1 | VH | QVTLKESGPVLVKPTETLTLTCTVSGFSLINARMGVSWIRQPPGKALEWLAHIFSNAEKSYRTSLKSRLTISKDTSKSQV |
| | | | VLTMTNMDPVDTATYYCARIPGYGGNGDYHYYGMDVWGQGTTVTVSS |
| 158 | FL_1 | VL | DIQMTQSPSSLSASLGDRVTITCRASQGIRNDLGWYQQKPGKAPKRLIYASSTLQSGVPSRFSGSGSGTEFTLTISSLQP |
| | | | EDFATYYCLQHNNFPWTFGQGTKVEIK |
| 159 | FL_1 | scFv | QVTLKESGPVLVKPTETLTLTCTVSGFSLINARMGVSWIRQPPGKALEWLAHIFSNAEKSYRTSLKSRLTISKDTSKSQV |
| | | | VLTMTNMDPVDTATYYCARIPGYGGNGDYHYYGMDVWGQGTTVTVSSGGGGSGGGGSGGGGSDIQMTQSPSSLSASLGDR |
| | | | VTITCRASQGIRNDLGWYQQKPGKAPKRLIYASSTLQSGVPSRFSGSGSGTEFTLTISSLQPEDFATYYCLQHNNFPWTF |
| | | | GQGTKVEIK |
| 160 | FL_1 | bi- | QVTLKESGPVLVKPTETLTLTCTVSGFSLINARMGVSWIRQPPGKALEWLAHIFSNAEKSYRTSLKSRLTISKDTSKSQV |
| | | specific | VLTMTNMDPVDTATYYCARIPGYGGNGDYHYYGMDVWGQGTTVTVSSGGGGSGGGGSGGGGSDIQMTQSPSSLSASLGDR |
| | | molecule | VTITCRASQGIRNDLGWYQQKPGKAPKRLIYASSTLQSGVPSRFSGSGSGTEFTLTISSLQPEDFATYYCLQHNNFPWTF |
| | | | GQGTKVEIKSGGGGSEVQLVESGGGLVQPGGSLKLSCAASGFTFNKYAMNWVRQAPGKGLEWVARIRSKYNNYATYYADS |
| | | | VKDRFTISRDDSKNTAYLQMNNLKTEDTAVYYCVRHGNFGNSYISYWAYWGQGTLVTVSSGGGGSGGGGSGGGGSQTVVT |
| | | | QEPSLTVSPGGTVTLTCGSSTGAVTSGNYPNWVQQKPGQAPRGLIGGTKFLAPGTPARFSGSLLGGKAALTLSGVQPEDE |
| | | | AEYYCVLWYSNRWVFGGGTKLTVL |
| 161 | FL_2 | VH CDR1 | NARMGVS |
| 162 | FL_2 | VH CDR2 | HIFSNDEKTYSTSLKS |
| 163 | FL_2 | VH CDR3 | IPYYGSGSHNYGMDV |
| 164 | FL_2 | VL CDR1 | RASQDIRNDFG |
| 165 | FL_2 | VL CDR2 | AASTLQS |
| 166 | FL_2 | VL CDR3 | LQYNTYPWT |
| 167 | FL_2 | VH | QVTLKESGPVLVKPTETLTLTCTVSGFSLRNARMGVSWIRQPPGKALEWLAHIFSNDEKTYSTSLKSRLTISRDTSKGQV |
| | | | VLTMTKMDPVDTATYYCARIPYYGSGSHNYGMDVWGQGTTVTVSS |
| 168 | FL_2 | VL | DIQMTQSPSSLSASVGDRVTITCRASQDIRNDFGWYQQKPGKAPQRLLYAASTLQSGVPSRFSGSGSGTEFTLTISSLQP |
| | | | EDFATYYCLQYNTYPWTFGQGTKVEIK |
| 169 | FL_2 | scFv | QVTLKESGPVLVKPTETLTLTCTVSGFSLRNARMGVSWIRQPPGKALEWLAHIFSNDEKTYSTSLKSRLTISRDTSKGQV |
| | | | VLTMTKMDPVDTATYYCARIPYYGSGSHNYGMDVWGQGTTVTVSSGGGGSGGGGSGGGGSDIQMTQSPSSLSASVGDRVT |
| | | | ITCRASQDIRNDFGWYQQKPGKAPQRLLYAASTLQSGVPSRFSGSGSGTEFTLTISSLQPEDFATYYCLQYNTYPWTFGQ |
| | | | GTKVEIK |
| 170 | FL_2 | bi- | QVTLKESGPVLVKPTETLTLTCTVSGFSLRNARMGVSWIRQPPGKALEWLAHIFSNDEKTYSTSLKSRLTISRDTSKGQV |
| | | specific | VLTMTKMDPVDTATYYCARIPYYGSGSHNYGMDVWGQGTTVTVSSGGGGSGGGGSGGGGSDIQMTQSPSSLSASVGDRVT |
| | | molecule | ITCRASQDIRNDFGWYQQKPGKAPQRLLYAASTLQSGVPSRFSGSGSGTEFTLTISSLQPEDFATYYCLQYNTYPWTFGQ |
| | | | GTKVEIKSGGGGSEVQLVESGGGLVQPGGSLKLSCAASGFTFNKYAMNWVRQAPGKGLEWVARIRSKYNNYATYYADSVK |
| | | | DRFTISRDDSKNTAYLQMNNLKTEDTAVYYCVRHGNFGNSYISYWAYWGQGTLVTVSSGGGGSGGGGSGGGGSQTVVTQE |
| | | | PSLTVSPGGTVTLTCGSSTGAVTSGNYPNWVQQKPGQAPRGLIGGTKFLAPGTPARFSGSLLGGKAALTLSGVQPEDEAE |
| | | | YYCVLWYSNRWVFGGGTKLTVL |
| 171 | FL_3 | VH CDR1 | NARMAVS |
| 172 | FL_3 | VH CDR2 | HIFSNGEKSYSTSLKS |
| 173 | FL_3 | VH CDR3 | IVGYSDWLLPFDH |
| 174 | FL_3 | VL CDR1 | RASQNINRFLN |
| 175 | FL_3 | VL CDR2 | AASSLQS |
| 176 | FL_3 | VL CDR3 | LQHNSYPWT |
| 177 | FL_3 | VH | QVTLKESGPALVKPTETLTLTCTVSGFSLSNARMAVSWIRQPPGKALEWLAHIFSNGEKSYSTSLKSRLTISKDTSKTQV |
| | | | VLTMTNTDPVDTATYFCARIVGYSDWLLPFDHWGQGIMVTVSS |
| 178 | FL_3 | VL | DIQMTQSPSSLSASVGDRVTITCRASQNINRFLNWYQQKPGKAPKLLIYAASSLQSGVPSRFSGSGSGTDFTLTISSLQP |
| | | | EDFATYYCLQHNSYPWTFGQGTKVDIK |
| 179 | FL_3 | scFv | QVTLKESGPALVKPTETLTLTCTVSGFSLSNARMAVSWIRQPPGKALEWLAHIFSNGEKSYSTSLKSRLTISKDTSKTQV |
| | | | VLTMTNTDPVDTATYFCARIVGYSDWLLPFDHWGQGIMVTVSSGGGGSGGGGSGGGGSDIQMTQSPSSLSASVGDRVTIT |
| | | | CRASQNINRFLNWYQQKPGKAPKLLIYAASSLQSGVPSRFSGSGSGTDFTLTISSLQPEDFATYYCLQHNSYPWTFGQGT |
| | | | KVDIK |
| 180 | FL_3 | bi- | QVTLKESGPALVKPTETLTLTCTVSGFSLSNARMAVSWIRQPPGKALEWLAHIFSNGEKSYSTSLKSRLTISKDTSKTQV |
| | | specific | VLTMTNTDPVDTATYFCARIVGYSDWLLPFDHWGQGIMVTVSSGGGGSGGGGSGGGGSDIQMTQSPSSLSASVGDRVTIT |
| | | molecule | CRASQNINRFLNWYQQKPGKAPKLLIYAASSLQSGVPSRFSGSGSGTDFTLTISSLQPEDFATYYCLQHNSYPWTFGQGT |
| | | | KVDIKSGGGGSEVQLVESGGGLVQPGGSLKLSCAASGFTFNKYAMNWVRQAPGKGLEWVARIRSKYNNYATYYADSVKDR |
| | | | FTISRDDSKNTAYLQMNNLKTEDTAVYYCVRHGNFGNSYISYWAYWGQGTLVTVSSGGGGSGGGGSGGGGSQTVVTQEPS |
| | | | LTVSPGGTVTLTCGSSTGAVTSGNYPNWVQQKPGQAPRGLIGGTKFLAPGTPARFSGSLLGGKAALTLSGVQPEDEAEYY |
| | | | CVLWYSNRWVFGGGTKLTVL |
| 181 | FL_4 | VH CDR1 | NAKMGVS |
| 182 | FL_4 | VH CDR2 | HIFSNDEKSYSTSLKS |
| 183 | FL_4 | VH CDR3 | IVGYGSGWYGYFDY |
| 184 | FL_4 | VL CDR1 | RASQDIRDDLG |
| 185 | FL_4 | VL CDR2 | GASTLQS |
| 186 | FL_4 | VL CDR3 | LQHNSYPLT |
| 187 | FL_4 | VH | QVTLKESGPALVKPTETLTLTCTLSGFSLNNAKMGVSWIRQPPGKALEWLAHIFSNDEKSYSTSLKSRLTISKDTSKGQV |
| | | | VLTMTNMDPVDTATYYCARIVGYGSGWYGYFDYWGQGTLVTVSS |
| 188 | FL_4 | VL | DIQMTQSPSSLSASVGDRVTITCRASQDIRDDLGWYQQKPGNAPKRLIYGASTLQSGVPSRFSGSGSGTEFTLTISSLQP |
| | | | EDFATYYCLQHNSYPLTFGGGTKVDIK |
| 189 | FL_4 | scFv | QVTLKESGPALVKPTETLTLTCTLSGFSLNNAKMGVSWIRQPPGKALEWLAHIFSNDEKSYSTSLKSRLTISKDTSKGQV |
| | | | VLTMTNMDPVDTATYYCARIVGYGSGWYGYFDYWGQGTLVTVSSGGGGSGGGGSGGGGSDIQMTQSPSSLSASVGDRVTI |
| | | | TCRASQDIRDDLGWYQQKPGNAPKRLIYGASTLQSGVPSRFSGSGSGTEFTLTISSLQPEDFATYYCLQHNSYPLTFGGG |
| | | | TKVDIK |
| 190 | FL_4 | bi- | QVTLKESGPALVKPTETLTLTCTLSGFSLNNAKMGVSWIRQPPGKALEWLAHIFSNDEKSYSTSLKSRLTISKDTSKGQV |
| | | specific | VLTMTNMDPVDTATYYCARIVGYGSGWYGYFDYWGQGTLVTVSSGGGGSGGGGSGGGGSDIQMTQSPSSLSASVGDRVTI |
| | | molecule | TCRASQDIRDDLGWYQQKPGNAPKRLIYGASTLQSGVPSRFSGSGSGTEFTLTISSLQPEDFATYYCLQHNSYPLTFGGG |
| | | | TKVDIKSGGGGSEVQLVESGGGLVQPGGSLKLSCAASGFTFNKYAMNWVRQAPGKGLEWVARIRSKYNNYATYYADSVKD |
| | | | RFTISRDDSKNTAYLQMNNLKTEDTAVYYCVRHGNFGNSYISYWAYWGQGTLVTVSSGGGGSGGGGSGGGGSQTVVTQEP |
| | | | SLTVSPGGTVTLTCGSSTGAVTSGNYPNWVQQKPGQAPRGLIGGTKFLAPGTPARFSGSLLGGKAALTLSGVQPEDEAEY |
| | | | YCVLWYSNRWVFGGGTKLTVL |
| 191 | FL_5 | VH CDR1 | NARMGVS |
| 192 | FL_5 | VH CDR2 | HIFWNDEKSYSTSLKS |
| 193 | FL_5 | VH CDR3 | IPYYGSGSYNYGMDV |
| 194 | FL_5 | VL CDR1 | RASQGIRNDLG |
| 195 | FL_5 | VL CDR2 | AASSLQS |
| 196 | FL_5 | VL CDR3 | LQHNTYPLT |
| 197 | FL_5 | VH | QVTLKESGPMLVKPTETLTLTCTFSGFSLRNARMGVSWIRQPPGKALEWLAHIFWNDEKSYSTSLKSRLTISKDTSKSQV |
| | | | VLTMTNMDPVDTATYYCARIPYYGSGSYNYGMDVWGQGTTVTVSS |
| 198 | FL_5 | VL | DIQMTQSPSSLSASVGDRVTITCRASQGIRNDLGWYQQKPGKAPKRLIYAASSLQSGVPSRFSGSGSGTEFTLTISSLQP |
| | | | EDFATYYCLQHNTYPLTFGGGTKVDIK |
| 199 | FL_5 | scFv | QVTLKESGPMLVKPTETLTLTCTFSGFSLRNARMGVSWIRQPPGKALEWLAHIFWNDEKSYSTSLKSRLTISKDTSKSQV |
| | | | VLTMTNMDPVDTATYYCARIPYYGSGSYNYGMDVWGQGTTVTVSSGGGGSGGGGSGGGGSDIQMTQSPSSLSASVGDRVT |
| | | | ITCRASQGIRNDLGWYQQKPGKAPKRLIYAASSLQSGVPSRFSGSGSGTEFTLTISSLQPEDFATYYCLQHNTYPLTFGG |
| | | | GTKVDIK |
| 200 | FL_5 | bi- | QVTLKESGPMLVKPTETLTLTCTFSGFSLRNARMGVSWIRQPPGKALEWLAHIFWNDEKSYSTSLKSRLTISKDTSKSQV |
| | | specific | VLTMTNMDPVDTATYYCARIPYYGSGSYNYGMDVWGQGTTVTVSSGGGGSGGGGSGGGGSDIQMTQSPSSLSASVGDRVT |
| | | molecule | ITCRASQGIRNDLGWYQQKPGKAPKRLIYAASSLQSGVPSRFSGSGSGTEFTLTISSLQPEDFATYYCLQHNTYPLTFGG |
| | | | GTKVDIKSGGGGSEVQLVESGGGLVQPGGSLKLSCAASGFTFNKYAMNWVRQAPGKGLEWVARIRSKYNNYATYYADSVK |
| | | | DRFTISRDDSKNTAYLQMNNLKTEDTAVYYCVRHGNFGNSYISYWAYWGQGTLVTVSSGGGGSGGGGSGGGGSQTVVTQE |
| | | | PSLTVSPGGTVTLTCGSSTGAVTSGNYPNWVQQKPGQAPRGLIGGTKFLAPGTPARFSGSLLGGKAALTLSGVQPEDEAE |
| | | | YYCVLWYSNRWVFGGGTKLTVL |
| 201 | FL_6 | VH CDR1 | NARMAVS |
| 202 | FL_6 | VH CDR2 | HIFSNDEKSYSPSLKS |
| 203 | FL_6 | VH CDR3 | IVGYGTGWYGFFDY |
| 204 | FL_6 | VL CDR1 | RASQGIRNDLG |
| 205 | FL_6 | VL CDR2 | AASVLQS |
| 206 | FL_6 | VL CDR3 | LQHNSYPLT |
| 207 | FL_6 | VH | QVTLKESGPTLVKPTETLTLTCTLSGFSLNNARMAVSWIRQPPGKTLEWLAHIFSNDEKSYSPSLKSRLTISKDTSKSQV |
| | | | VLTMTNMDPEDTATYYCARIVGYGTGWYGFFDYWGQGILVTVSS |
| 208 | FL_6 | VL | DIQMTQSPSSLSASVGDRVTITCRASQGIRNDLGWFQQKPGKAPKRLIYAASVLQSGVPSRFSGSGSGTEFTLTISSLQP |
| | | | EDFATYYCLQHNSYPLTFGGGTKVDIK |
| 209 | FL_6 | scFv | QVTLKESGPTLVKPTETLTLTCTLSGFSLNNARMAVSWIRQPPGKTLEWLAHIFSNDEKSYSPSLKSRLTISKDTSKSQV |
| | | | VLTMTNMDPEDTATYYCARIVGYGTGWYGFFDYWGQGILVTVSSGGGGSGGGGSGGGGSDIQMTQSPSSLSASVGDRVTI |
| | | | TCRASQGIRNDLGWFQQKPGKAPKRLIYAASVLQSGVPSRFSGSGSGTEFTLTISSLQPEDFATYYCLQHNSYPLTFGGG |
| | | | TKVDIK |
| 210 | FL_6 | bi- | QVTLKESGPTLVKPTETLTLTCTLSGFSLNNARMAVSWIRQPPGKTLEWLAHIFSNDEKSYSPSLKSRLTISKDTSKSQV |
| | | specific | VLTMTNMDPEDTATYYCARIVGYGTGWYGFFDYWGQGILVTVSSGGGGSGGGGSGGGGSDIQMTQSPSSLSASVGDRVTI |
| | | molecule | TCRASQGIRNDLGWFQQKPGKAPKRLIYAASVLQSGVPSRFSGSGSGTEFTLTISSLQPEDFATYYCLQHNSYPLTFGGG |
| | | | TKVDIKSGGGGSEVQLVESGGGLVQPGGSLKLSCAASGFTFNKYAMNWVRQAPGKGLEWVARIRSKYNNYATYYADSVKD |
| | | | RFTISRDDSKNTAYLQMNNLKTEDTAVYYCVRHGNFGNSYISYWAYWGQGTLVTVSSGGGGSGGGGSGGGGSQTVVTQEP |
| | | | SLTVSPGGTVTLTCGSSTGAVTSGNYPNWVQQKPGQAPRGLIGGTKFLAPGTPARFSGSLLGGKAALTLSGVQPEDEAEY |
| | | | YCVLWYSNRWVFGGGTKLTVL |
| 211 | FL_7 | VH CDR1 | NARMGVS |
| 212 | FL_7 | VH CDR2 | HIFSNDEKSYSTSLKN |
| 213 | FL_7 | VH CDR3 | IVGYGTGWFGYFDY |
| 214 | FL_7 | VL CDR1 | RASQDIRTDLA |
| 215 | FL_7 | VL CDR2 | AASSLQS |
| 216 | FL_7 | VL CDR3 | LQHNRYPLT |
| 217 | FL_7 | VH | QVTLKESGPTLVKPTETLTLTCTVSGFSLNNARMGVSWIRQPPGKALEWLAHIFSNDEKSYSTSLKNRLTISKDSSKTQV |
| | | | VLTMTNVDPVDTATYYCARIVGYGTGWFGYFDYWGQGTQVTVSS |
| 218 | FL_7 | VL | DIQMTQSPSSLSASVGDRVTITCRASQDIRTDLAWYQQKPGKAPKRLIYAASSLQSGVPSRFSGSGSGTEFTLTISSLQP |
| | | | EDFATYYCLQHNRYPLTFGGGTKVDIK |
| 219 | FL_7 | scFv | QVTLKESGPTLVKPTETLTLTCTVSGFSLNNARMGVSWIRQPPGKALEWLAHIFSNDEKSYSTSLKNRLTISKDSSKTQV |
| | | | VLTMTNVDPVDTATYYCARIVGYGTGWFGYFDYWGQGTQVTVSSGGGGSGGGGSGGGGSDIQMTQSPSSLSASVGDRVTI |
| | | | TCRASQDIRTDLAWYQQKPGKAPKRLIYAASSLQSGVPSRFSGSGSGTEFTLTISSLQPEDFATYYCLQHNRYPLTFGGG |
| | | | TKVDIK |
| 220 | FL_7 | bi- | QVTLKESGPTLVKPTETLTLTCTVSGFSLNNARMGVSWIRQPPGKALEWLAHIFSNDEKSYSTSLKNRLTISKDSSKTQV |
| | | specific | VLTMTNVDPVDTATYYCARIVGYGTGWFGYFDYWGQGTQVTVSSGGGGSGGGGSGGGGSDIQMTQSPSSLSASVGDRVTI |
| | | molecule | TCRASQDIRTDLAWYQQKPGKAPKRLIYAASSLQSGVPSRFSGSGSGTEFTLTISSLQPEDFATYYCLQHNRYPLTFGGG |
| | | | TKVDIKSGGGGSEVQLVESGGGLVQPGGSLKLSCAASGFTFNKYAMNWVRQAPGKGLEWVARIRSKYNNYATYYADSVKD |
| | | | RFTISRDDSKNTAYLQMNNLKTEDTAVYYCVRHGNFGNSYISYWAYWGQGTLVTVSSGGGGSGGGGSGGGGSQTVVTQEP |
| | | | SLTVSPGGTVTLTCGSSTGAVTSGNYPNWVQQKPGQAPRGLIGGTKFLAPGTPARFSGSLLGGKAALTLSGVQPEDEAEY |
| | | | YCVLWYSNRWVFGGGTKLTVL |
| 221 | FL_8 | VH CDR1 | YARMGVS |
| 222 | FL_8 | VH CDR2 | QIFSNDEKSYSTSLKS |
| 223 | FL_8 | VH CDR3 | IVGYGTGWYGFFDY |
| 224 | FL_8 | VL CDR1 | RASQGIRNDLG |
| 225 | FL_8 | VL CDR2 | AASSLQS |
| 226 | FL_8 | VL CDR3 | LQHNSYPLT |
| 227 | FL_8 | VH | QVTLKESGPALVKPTETLTLTCTVSGFSLSYARMGVSWIRQPPGKALEWLAQIFSNDEKSYSTSLKSRLTISKGTSNSQV |
| | | | VLTMTNMDPEDTATYYCARIVGYGTGWYGFFDYWGQGILVTVSS |
| 228 | FL_8 | VL | DIQMTQSPSSLSASVGDRVTITCRASQGIRNDLGWYQQKPGKAPKRLIYAASSLQSGVPSRFSGSGSGTEFTLTISSLQP |
| | | | EDFATYYCLQHNSYPLTFGGGTKVDIK |
| 229 | FL_8 | scFv | QVTLKESGPALVKPTETLTLTCTVSGFSLSYARMGVSWIRQPPGKALEWLAQIFSNDEKSYSTSLKSRLTISKGTSNSQV |
| | | | VLTMTNMDPEDTATYYCARIVGYGTGWYGFFDYWGQGILVTVSSGGGGSGGGGSGGGGSDIQMTQSPSSLSASVGDRVTI |
| | | | TCRASQGIRNDLGWYQQKPGKAPKRLIYAASSLQSGVPSRFSGSGSGTEFTLTISSLQPEDFATYYCLQHNSYPLTFGGG |
| | | | TKVDIK |
| 230 | FL_8 | bi- | QVTLKESGPALVKPTETLTLTCTVSGFSLSYARMGVSWIRQPPGKALEWLAQIFSNDEKSYSTSLKSRLTISKGTSNSQV |
| | | specific | VLTMTNMDPEDTATYYCARIVGYGTGWYGFFDYWGQGILVTVSSGGGGSGGGGSGGGGSDIQMTQSPSSLSASVGDRVTI |
| | | molecule | TCRASQGIRNDLGWYQQKPGKAPKRLIYAASSLQSGVPSRFSGSGSGTEFTLTISSLQPEDFATYYCLQHNSYPLTFGGG |
| | | | TKVDIKSGGGGSEVQLVESGGGLVQPGGSLKLSCAASGFTFNKYAMNWVRQAPGKGLEWVARIRSKYNNYATYYADSVKD |
| | | | RFTISRDDSKNTAYLQMNNLKTEDTAVYYCVRHGNFGNSYISYWAYWGQGTLVTVSSGGGGSGGGGSGGGGSQTVVTQEP |
| | | | SLTVSPGGTVTLTCGSSTGAVTSGNYPNWVQQKPGQAPRGLIGGTKFLAPGTPARFSGSLLGGKAALTLSGVQPEDEAEY |
| | | | YCVLWYSNRWVFGGGTKLTVL |
| 231 | FL_9 | VH CDR1 | NARMGVS |
| 232 | FL_9 | VH CDR2 | HIFSNDEKSYSTSLKS |
| 233 | FL_9 | VH CDR3 | IPGYGGNFYYHYYGMDV |
| 234 | FL_9 | VL CDR1 | RASQGIRNDLA |
| 235 | FL_9 | VL CDR2 | AASTVQS |
| 236 | FL_9 | VL CDR3 | LQHNSFPWT |
| 237 | FL_9 | VH | QVTLKESGPTLVKPTETLTLTCTVSGFSLSNARMGVSWIRQPPGKALEWLAHIFSNDEKSYSTSLKSRLTISKDTSKSQV |
| | | | VLTMTNMDPVDTATYYCARIPGYGGNFYYHYYGMDVWGQGTTVTVSS |
| 238 | FL_9 | VL | DIQMTQSPSSLSASVGDRVTITCRASQGIRNDLAWYQQKPGKAPKRLIYAASTVQSGVPSRFSGSGSGTEFALTISSLQP |
| | | | EDFATYYCLQHNSFPWTFGQGTKVDIK |
| 239 | FL_9 | scFv | QVTLKESGPTLVKPTETLTLTCTVSGFSLSNARMGVSWIRQPPGKALEWLAHIFSNDEKSYSTSLKSRLTISKDTSKSQV |
| | | | VLTMTNMDPVDTATYYCARIPGYGGNFYYHYYGMDVWGQGTTVTVSSGGGGSGGGGSGGGGSDIQMTQSPSSLSASVGDR |
| | | | VTITCRASQGIRNDLAWYQQKPGKAPKRLIYAASTVQSGVPSRFSGSGSGTEFALTISSLQPEDFATYYCLQHNSFPWTF |
| | | | GQGTKVDIK |
| 240 | FL_9 | bi- | QVTLKESGPTLVKPTETLTLTCTVSGFSLSNARMGVSWIRQPPGKALEWLAHIFSNDEKSYSTSLKSRLTISKDTSKSQV |
| | | specific | VLTMTNMDPVDTATYYCARIPGYGGNFYYHYYGMDVWGQGTTVTVSSGGGGSGGGGSGGGGSDIQMTQSPSSLSASVGDR |
| | | molecule | VTITCRASQGIRNDLAWYQQKPGKAPKRLIYAASTVQSGVPSRFSGSGSGTEFALTISSLQPEDFATYYCLQHNSFPWTF |
| | | | GQGTKVDIKSGGGGSEVQLVESGGGLVQPGGSLKLSCAASGFTFNKYAMNWVRQAPGKGLEWVARIRSKYNNYATYYADS |
| | | | VKDRFTISRDDSKNTAYLQMNNLKTEDTAVYYCVRHGNFGNSYISYWAYWGQGTLVTVSSGGGGSGGGGSGGGGSQTVVT |
| | | | QEPSLTVSPGGTVTLTCGSSTGAVTSGNYPNWVQQKPGQAPRGLIGGTKFLAPGTPARFSGSLLGGKAALTLSGVQPEDE |
| | | | AEYYCVLWYSNRWVFGGGTKLTVL |
| 241 | FL_10 | VH CDR1 | NARMGVS |
| 242 | FL_10 | VH CDR2 | HIFSNDEKSYSTSLKS |
| 243 | FL_10 | VH CDR3 | MPEYSSGWSGAFDI |
| 244 | FL_10 | VL CDR1 | RASQDIRDDLG |
| 245 | FL_10 | VL CDR2 | GASTLQS |
| 246 | FL_10 | VL CDR3 | LQHNSYPLT |
| 247 | FL_10 | VH | QVTLKESGPVLVKPTETLTLTCTVSGFSFRNARMGVSWIRQPPGKALEWLAHIFSNDEKSYSTSLKSRLTISKDTSKSQV |
| | | | VLTLTNMDPVDTATYFCARMPEYSSGWSGAFDIWGQGTMVTVSS |
| 248 | FL_10 | VL | DIQMTQSPSSLSASVGDRVTITCRASQDIRDDLGWYQQKPGNAPKRLIYGASTLQSGVPSRFSGSGSGTEFTLTISSLQP |
| | | | EDFATYYCLQHNSYPLTFGGGTKVDIK |
| 249 | FL_10 | scFv | QVTLKESGPVLVKPTETLTLTCTVSGFSFRNARMGVSWIRQPPGKALEWLAHIFSNDEKSYSTSLKSRLTISKDTSKSQV |
| | | | VLTLTNMDPVDTATYFCARMPEYSSGWSGAFDIWGQGTMVTVSSGGGGSGGGGSGGGGSDIQMTQSPSSLSASVGDRVTI |
| | | | TCRASQDIRDDLGWYQQKPGNAPKRLIYGASTLQSGVPSRFSGSGSGTEFTLTISSLQPEDFATYYCLQHNSYPLTFGGG |
| | | | TKVDIK |
| 250 | FL_10 | bi- | QVTLKESGPVLVKPTETLTLTCTVSGFSFRNARMGVSWIRQPPGKALEWLAHIFSNDEKSYSTSLKSRLTISKDTSKSQV |
| | | specific | VLTLTNMDPVDTATYFCARMPEYSSGWSGAFDIWGQGTMVTVSSGGGGSGGGGSGGGGSDIQMTQSPSSLSASVGDRVTI |
| | | molecule | TCRASQDIRDDLGWYQQKPGNAPKRLIYGASTLQSGVPSRFSGSGSGTEFTLTISSLQPEDFATYYCLQHNSYPLTFGGG |
| | | | TKVDIKSGGGGSEVQLVESGGGLVQPGGSLKLSCAASGFTFNKYAMNWVRQAPGKGLEWVARIRSKYNNYATYYADSVKD |
| | | | RFTISRDDSKNTAYLQMNNLKTEDTAVYYCVRHGNFGNSYISYWAYWGQGTLVTVSSGGGGSGGGGSGGGGSQTVVTQEP |
| | | | SLTVSPGGTVTLTCGSSTGAVTSGNYPNWVQQKPGQAPRGLIGGTKFLAPGTPARFSGSLLGGKAALTLSGVQPEDEAEY |
| | | | YCVLWYSNRWVFGGGTKLTVL |
| 251 | FL_11 | VH CDR1 | NAKMGVS |
| 252 | FL_11 | VH CDR2 | QIFSNGEKSYSTSLKS |
| 253 | FL_11 | VH CDR3 | IVGYGSGWYGYFDY |
| 254 | FL_11 | VL CDR1 | RASQGIRNDLG |
| 255 | FL_11 | VL CDR2 | GASTLQS |
| 256 | FL_11 | VL CDR3 | LQHNSYPLT |
| 257 | FL_11 | VH | QVTLKESGPVLVKPTETLTLTCTLSGFSLNNAKMGVSWIRQPPGKALEWLAQIFSNGEKSYSTSLKSRLTISKDTSKGQV |
| | | | VLTMTNMDPVDTATYYCSRIVGYGSGWYGYFDYWGQGTLVTVSS |
| 258 | FL_11 | VL | DIQMTQSPSSLSASVGDRVTITCRASQGIRNDLGWYQQKPGKAPKRLIYGASTLQSGVPSRFSGSGSGTEFTLTISSLQP |
| | | | EDFATYYCLQHNSYPLTFGGGTKVEIK |
| 259 | FL_11 | scFv | QVTLKESGPVLVKPTETLTLTCTLSGFSLNNAKMGVSWIRQPPGKALEWLAQIFSNGEKSYSTSLKSRLTISKDTSKGQV |
| | | | VLTMTNMDPVDTATYYCSRIVGYGSGWYGYFDYWGQGTLVTVSSGGGGSGGGGSGGGGSDIQMTQSPSSLSASVGDRVTI |
| | | | TCRASQGIRNDLGWYQQKPGKAPKRLIYGASTLQSGVPSRFSGSGSGTEFTLTISSLQPEDFATYYCLQHNSYPLTFGGG |
| | | | TKVEIK |
| 260 | FL_11 | bi- | QVTLKESGPVLVKPTETLTLTCTLSGFSLNNAKMGVSWIRQPPGKALEWLAQIFSNGEKSYSTSLKSRLTISKDTSKGQV |
| | | specific | VLTMTNMDPVDTATYYCSRIVGYGSGWYGYFDYWGQGTLVTVSSGGGGSGGGGSGGGGSDIQMTQSPSSLSASVGDRVTI |
| | | molecule | TCRASQGIRNDLGWYQQKPGKAPKRLIYGASTLQSGVPSRFSGSGSGTEFTLTISSLQPEDFATYYCLQHNSYPLTFGGG |
| | | | TKVEIKSGGGGSEVQLVESGGGLVQPGGSLKLSCAASGFTFNKYAMNWVRQAPGKGLEWVARIRSKYNNYATYYADSVKD |
| | | | RFTISRDDSKNTAYLQMNNLKTEDTAVYYCVRHGNFGNSYISYWAYWGQGTLVTVSSGGGGSGGGGSGGGGSQTVVTQEP |
| | | | SLTVSPGGTVTLTCGSSTGAVTSGNYPNWVQQKPGQAPRGLIGGTKFLAPGTPARFSGSLLGGKAALTLSGVQPEDEAEY |
| | | | YCVLWYSNRWVFGGGTKLTVL |
| 261 | FL_12 | VH CDR1 | NARMGVS |
| 262 | FL_12 | VH CDR2 | NIFSNDEKSYSTSLKS |
| 263 | FL_12 | VH CDR3 | IVGYGSGWYGYFDY |
| 264 | FL_12 | VL CDR1 | RASQGIRNDLG |
| 265 | FL_12 | VL CDR2 | AASSLQS |
| 266 | FL_12 | VL CDR3 | LQHNSYPLT |
| 267 | FL_12 | VH | QVTLKESGPALVKPTETLTLTCTVSGFSLSNARMGVSWIRQPPGKALEWLANIFSNDEKSYSTSLKSRLTISKGTSKSQV |
| | | | VLTMTNMDPEDTATYYCARIVGYGSGWYGYFDYWGQGTLVTVSS |
| 268 | FL_12 | VL | DIQMTQSPSSLSASVGDRVTITCRASQGIRNDLGWYQQKPGKAPQRLIYAASSLQSGVPSRFSGSGSGTEFTLTISSLQP |
| | | | EDFATYYCLQHNSYPLTFGGGTKVEIK |
| 269 | FL_12 | scFv | QVTLKESGPALVKPTETLTLTCTVSGFSLSNARMGVSWIRQPPGKALEWLANIFSNDEKSYSTSLKSRLTISKGTSKSQV |
| | | | VLTMTNMDPEDTATYYCARIVGYGSGWYGYFDYWGQGTLVTVSSGGGGSGGGGSGGGGSDIQMTQSPSSLSASVGDRVTI |
| | | | TCRASQGIRNDLGWYQQKPGKAPQRLIYAASSLQSGVPSRFSGSGSGTEFTLTISSLQPEDFATYYCLQHNSYPLTFGGG |
| | | | TKVEIK |
| 270 | FL_12 | bi- | QVTLKESGPALVKPTETLTLTCTVSGFSLSNARMGVSWIRQPPGKALEWLANIFSNDEKSYSTSLKSRLTISKGTSKSQV |
| | | specific | VLTMTNMDPEDTATYYCARIVGYGSGWYGYFDYWGQGTLVTVSSGGGGSGGGGSGGGGSDIQMTQSPSSLSASVGDRVTI |
| | | molecule | TCRASQGIRNDLGWYQQKPGKAPQRLIYAASSLQSGVPSRFSGSGSGTEFTLTISSLQPEDFATYYCLQHNSYPLTFGGG |
| | | | TKVEIKSGGGGSEVQLVESGGGLVQPGGSLKLSCAASGFTFNKYAMNWVRQAPGKGLEWVARIRSKYNNYATYYADSVKD |
| | | | RFTISRDDSKNTAYLQMNNLKTEDTAVYYCVRHGNFGNSYISYWAYWGQGTLVTVSSGGGGSGGGGSGGGGSQTVVTQEP |
| | | | SLTVSPGGTVTLTCGSSTGAVTSGNYPNWVQQKPGQAPRGLIGGTKFLAPGTPARFSGSLLGGKAALTLSGVQPEDEAEY |
| | | | YCVLWYSNRWVFGGGTKLTVL |
| 271 | FL_13 | VH CDR1 | NARMGVS |
| 272 | FL_13 | VH CDR2 | HIFSNDEKSYSTSLKN |
| 273 | FL_13 | VH CDR3 | IVGYGSGWYGFFDY |
| 274 | FL_13 | VL CDR1 | RASQGIRNDLG |
| 275 | FL_13 | VL CDR2 | AASTLQS |
| 276 | FL_13 | VL CDR3 | LQHNSYPLT |
| 277 | FL_13 | VH | QVTLKESGPTLVKPTETLTLTCTLSGFSLNNARMGVSWIRQPPGKALEWLAHIFSNDEKSYSTSLKNRLTISKDSSKTQV |
| | | | VLTMTNVDPVDTATYYCARIVGYGSGWYGFFDYWGQGTLVTVSS |
| 278 | FL_13 | VL | DIQMTQSPSSLSASVGDRVTITCRASQGIRNDLGWYQQKPGKAPKRLIYAASTLQSGVPSRFSGSGSGTEFTLTISSLQP |
| | | | EDFATYYCLQHNSYPLTFGGGTKVEIK |
| 279 | FL_13 | scFv | QVTLKESGPTLVKPTETLTLTCTLSGFSLNNARMGVSWIRQPPGKALEWLAHIFSNDEKSYSTSLKNRLTISKDSSKTQV |
| | | | VLTMTNVDPVDTATYYCARIVGYGSGWYGFFDYWGQGTLVTVSSGGGGSGGGGSGGGGSDIQMTQSPSSLSASVGDRVTI |
| | | | TCRASQGIRNDLGWYQQKPGKAPKRLIYAASTLQSGVPSRFSGSGSGTEFTLTISSLQPEDFATYYCLQHNSYPLTFGGG |
| | | | TKVEIK |
| 280 | FL_13 | bi- | QVTLKESGPTLVKPTETLTLTCTLSGFSLNNARMGVSWIRQPPGKALEWLAHIFSNDEKSYSTSLKNRLTISKDSSKTQV |
| | | specific | VLTMTNVDPVDTATYYCARIVGYGSGWYGFFDYWGQGTLVTVSSGGGGSGGGGSGGGGSDIQMTQSPSSLSASVGDRVTI |
| | | molecule | TCRASQGIRNDLGWYQQKPGKAPKRLIYAASTLQSGVPSRFSGSGSGTEFTLTISSLQPEDFATYYCLQHNSYPLTFGGG |
| | | | TKVEIKSGGGGSEVQLVESGGGLVQPGGSLKLSCAASGFTFNKYAMNWVRQAPGKGLEWVARIRSKYNNYATYYADSVKD |
| | | | RFTISRDDSKNTAYLQMNNLKTEDTAVYYCVRHGNFGNSYISYWAYWGQGTLVTVSSGGGGSGGGGSGGGGSQTVVTQEP |
| | | | SLTVSPGGTVTLTCGSSTGAVTSGNYPNWVQQKPGQAPRGLIGGTKFLAPGTPARFSGSLLGGKAALTLSGVQPEDEAEY |
| | | | YCVLWYSNRWVFGGGTKLTVL |
| 281 | FL_14 | VH CDR1 | NARMAVS |
| 282 | FL_14 | VH CDR2 | HIFSNDEKSYSTSLKS |
| 283 | FL_14 | VH CDR3 | IVGYGSGWYGYFDY |
| 284 | FL_14 | VL CDR1 | RASQDIRNDLG |
| 285 | FL_14 | VL CDR2 | AASTLQS |
| 286 | FL_14 | VL CDR3 | LQHNSYPLT |
| 287 | FL_14 | VH | QVTLKESGPALVKPTETLTLTCTLSGFSLNNARMAVSWIRQPPGKTLEWLAHIFSNDEKSYSTSLKSRLTISKDTSKGQV |
| | | | VLTMTNMDPVDTATYYCARIVGYGSGWYGYFDYWGQGTLVTVSS |
| 288 | FL_14 | VL | DIQMTQSPSSLSASVGDRVTITCRASQDIRNDLGWYQQKPGKAPKRLIYAASTLQSGVPSRFSGSGSGTEFTLTISSLQP |
| | | | EDFATYYCLQHNSYPLTFGGGTKVEIK |
| 289 | FL_14 | scFv | QVTLKESGPALVKPTETLTLTCTLSGFSLNNARMAVSWIRQPPGKTLEWLAHIFSNDEKSYSTSLKSRLTISKDTSKGQV |
| | | | VLTMTNMDPVDTATYYCARIVGYGSGWYGYFDYWGQGTLVTVSSGGGGSGGGGSGGGGSDIQMTQSPSSLSASVGDRVTI |
| | | | TCRASQDIRNDLGWYQQKPGKAPKRLIYAASTLQSGVPSRFSGSGSGTEFTLTISSLQPEDFATYYCLQHNSYPLTFGGG |
| | | | TKVEIK |
| 290 | FL_14 | bi- | QVTLKESGPALVKPTETLTLTCTLSGFSLNNARMAVSWIRQPPGKTLEWLAHIFSNDEKSYSTSLKSRLTISKDTSKGQV |
| | | specific | VLTMTNMDPVDTATYYCARIVGYGSGWYGYFDYWGQGTLVTVSSGGGGSGGGGSGGGGSDIQMTQSPSSLSASVGDRVTI |
| | | molecule | TCRASQDIRNDLGWYQQKPGKAPKRLIYAASTLQSGVPSRFSGSGSGTEFTLTISSLQPEDFATYYCLQHNSYPLTFGGG |
| | | | TKVEIKSGGGGSEVQLVESGGGLVQPGGSLKLSCAASGFTFNKYAMNWVRQAPGKGLEWVARIRSKYNNYATYYADSVKD |
| | | | RFTISRDDSKNTAYLQMNNLKTEDTAVYYCVRHGNFGNSYISYWAYWGQGTLVTVSSGGGGSGGGGSGGGGSQTVVTQEP |
| | | | SLTVSPGGTVTLTCGSSTGAVTSGNYPNWVQQKPGQAPRGLIGGTKFLAPGTPARFSGSLLGGKAALTLSGVQPEDEAEY |
| | | | YCVLWYSNRWVFGGGTKLTVL |
| 291 | FL_15 | VH CDR1 | NARMAVS |
| 292 | FL_15 | VH CDR2 | HIFSNDEKSYSTSLKS |
| 293 | FL_15 | VH CDR3 | IVGYGSGWYGYFDY |
| 294 | FL_15 | VL CDR1 | RASQDIGNDLG |
| 295 | FL_15 | VL CDR2 | AASSLQS |
| 296 | FL_15 | VL CDR3 | LQHNSYPLT |
| 297 | FL_15 | VH | QVTLKESGPALVKPTETLTLTCTLSGFSLNNARMAVSWIRQPPGKTLEWLAHIFSNDEKSYSTSLKSRLTISKDTSKGQV |
| | | | VLTMTNMDPVDTATYYCARIVGYGSGWYGYFDYWGQGTLVTVSS |
| 298 | FL_15 | VL | DIQMTQSPSSLSASVGDRVTITCRASQDIGNDLGWYQQKPGKAPKRLIYAASSLQSGVPSRFSGSGSGTEFTLTISSLQP |
| | | | EDFATYYCLQHNSYPLTFGGGTKVEIK |
| 299 | FL_15 | scFv | QVTLKESGPALVKPTETLTLTCTLSGFSLNNARMAVSWIRQPPGKTLEWLAHIFSNDEKSYSTSLKSRLTISKDTSKGQV |
| | | | VLTMTNMDPVDTATYYCARIVGYGSGWYGYFDYWGQGTLVTVSSGGGGSGGGGSGGGGSDIQMTQSPSSLSASVGDRVTI |
| | | | TCRASQDIGNDLGWYQQKPGKAPKRLIYAASSLQSGVPSRFSGSGSGTEFTLTISSLQPEDFATYYCLQHNSYPLTFGGG |
| | | | TKVEIK |
| 300 | FL_15 | bi- | QVTLKESGPALVKPTETLTLTCTLSGFSLNNARMAVSWIRQPPGKTLEWLAHIFSNDEKSYSTSLKSRLTISKDTSKGQV |
| | | specific | VLTMTNMDPVDTATYYCARIVGYGSGWYGYFDYWGQGTLVTVSSGGGGSGGGGSGGGGSDIQMTQSPSSLSASVGDRVTI |
| | | molecule | TCRASQDIGNDLGWYQQKPGKAPKRLIYAASSLQSGVPSRFSGSGSGTEFTLTISSLQPEDFATYYCLQHNSYPLTFGGG |
| | | | TKVEIKSGGGGSEVQLVESGGGLVQPGGSLKLSCAASGFTFNKYAMNWVRQAPGKGLEWVARIRSKYNNYATYYADSVKD |
| | | | RFTISRDDSKNTAYLQMNNLKTEDTAVYYCVRHGNFGNSYISYWAYWGQGTLVTVSSGGGGSGGGGSGGGGSQTVVTQEP |
| | | | SLTVSPGGTVTLTCGSSTGAVTSGNYPNWVQQKPGQAPRGLIGGTKFLAPGTPARFSGSLLGGKAALTLSGVQPEDEAEY |
| | | | YCVLWYSNRWVFGGGTKLTVL |
| 301 | FL_16 | VH CDR1 | NARMAVS |
| 302 | FL_16 | VH CDR2 | HIFSNDEKSYSTSLKS |
| 303 | FL_16 | VH CDR3 | IVGYGSGWYGYFDY |
| 304 | FL_16 | VL CDR1 | RASQDIRYDLA |
| 305 | FL_16 | VL CDR2 | AASSLQS |
| 306 | FL_16 | VL CDR3 | LQHNFYPLT |
| 307 | FL_16 | VH | QVTLKESGPVLVKPTETLTLTCTVSGFSLRNARMAVSWIRQPPGKTLEWLAHIFSNDEKSYSTSLKSRLTISKDTSKSQV |
| | | | VLTMTNMDPVDTATYYCARIVGYGSGWYGYFDYWGQGTLVTVSS |
| 308 | FL_16 | VL | DIQMTQSPSSVSASVGDRVTITCRASQDIRYDLAWYQQKPGKAPKRLIYAASSLQSGVPSRFSGSGSGTEFTLTISSLQP |
| | | | EDFATYYCLQHNFYPLTFGGGTKVEIK |
| 309 | FL_16 | scFv | QVTLKESGPVLVKPTETLTLTCTVSGFSLRNARMAVSWIRQPPGKTLEWLAHIFSNDEKSYSTSLKSRLTISKDTSKSQV |
| | | | VLTMTNMDPVDTATYYCARIVGYGSGWYGYFDYWGQGTLVTVSSGGGGSGGGGSGGGGSDIQMTQSPSSVSASVGDRVTI |
| | | | TCRASQDIRYDLAWYQQKPGKAPKRLIYAASSLQSGVPSRFSGSGSGTEFTLTISSLQPEDFATYYCLQHNFYPLTFGGG |
| | | | TKVEIK |
| 310 | FL_16 | bi- | QVTLKESGPVLVKPTETLTLTCTVSGFSLRNARMAVSWIRQPPGKTLEWLAHIFSNDEKSYSTSLKSRLTISKDTSKSQV |
| | | specific | VLTMTNMDPVDTATYYCARIVGYGSGWYGYFDYWGQGTLVTVSSGGGGSGGGGSGGGGSDIQMTQSPSSVSASVGDRVTI |
| | | molecule | TCRASQDIRYDLAWYQQKPGKAPKRLIYAASSLQSGVPSRFSGSGSGTEFTLTISSLQPEDFATYYCLQHNFYPLTFGGG |
| | | | TKVEIKSGGGGSEVQLVESGGGLVQPGGSLKLSCAASGFTFNKYAMNWVRQAPGKGLEWVARIRSKYNNYATYYADSVKD |
| | | | RFTISRDDSKNTAYLQMNNLKTEDTAVYYCVRHGNFGNSYISYWAYWGQGTLVTVSSGGGGSGGGGSGGGGSQTVVTQEP |
| | | | SLTVSPGGTVTLTCGSSTGAVTSGNYPNWVQQKPGQAPRGLIGGTKFLAPGTPARFSGSLLGGKAALTLSGVQPEDEAEY |
| | | | YCVLWYSNRWVFGGGTKLTVL |
| 311 | FL_17 | VH CDR1 | NARMGVS |
| 312 | FL_17 | VH CDR2 | NIFSNDEKSYSTSLKS |
| 313 | FL_17 | VH CDR3 | IVGYGSGWYGYFDY |
| 314 | FL_17 | VL CDR1 | RASQDIRNDLG |
| 315 | FL_17 | VL CDR2 | ATSIRQS |
| 316 | FL_17 | VL CDR3 | LQHNSFPLT |
| 317 | FL_17 | VH | QVTLKESGPTLVKPTETLTLTCTVSGFSLSNARMGVSWIRQPPGKALEWLANIFSNDEKSYSTSLKSRLTISKGTSKSQV |
| | | | VLTMTNVNPVDTGTYYCARIVGYGSGWYGYFDYWGQGTLVTVSS |
| 318 | FL_17 | VL | DIQMTQSPSSLSASVGDRVTITCRASQDIRNDLGWYQQKPGKAPKRLIYATSIRQSGVPSRFTGSGSGTEFTLTISGLQP |
| | | | EDFATYFCLQHNSFPLTFGGGTKVEIK |
| 319 | FL_17 | scFv | QVTLKESGPTLVKPTETLTLTCTVSGFSLSNARMGVSWIRQPPGKALEWLANIFSNDEKSYSTSLKSRLTISKGTSKSQV |
| | | | VLTMTNVNPVDTGTYYCARIVGYGSGWYGYFDYWGQGTLVTVSSGGGGSGGGGSGGGGSDIQMTQSPSSLSASVGDRVTI |
| | | | TCRASQDIRNDLGWYQQKPGKAPKRLIYATSIRQSGVPSRFTGSGSGTEFTLTISGLQPEDFATYFCLQHNSFPLTFGGG |
| | | | TKVEIK |
| 320 | FL_17 | bi- | QVTLKESGPTLVKPTETLTLTCTVSGFSLSNARMGVSWIRQPPGKALEWLANIFSNDEKSYSTSLKSRLTISKGTSKSQV |
| | | specific | VLTMTNVNPVDTGTYYCARIVGYGSGWYGYFDYWGQGTLVTVSSGGGGSGGGGSGGGGSDIQMTQSPSSLSASVGDRVTI |
| | | molecule | TCRASQDIRNDLGWYQQKPGKAPKRLIYATSIRQSGVPSRFTGSGSGTEFTLTISGLQPEDFATYFCLQHNSFPLTFGGG |
| | | | TKVEIKSGGGGSEVQLVESGGGLVQPGGSLKLSCAASGFTFNKYAMNWVRQAPGKGLEWVARIRSKYNNYATYYADSVKD |
| | | | RFTISRDDSKNTAYLQMNNLKTEDTAVYYCVRHGNFGNSYISYWAYWGQGTLVTVSSGGGGSGGGGSGGGGSQTVVTQEP |
| | | | SLTVSPGGTVTLTCGSSTGAVTSGNYPNWVQQKPGQAPRGLIGGTKFLAPGTPARFSGSLLGGKAALTLSGVQPEDEAEY |
| | | | YCVLWYSNRWVFGGGTKLTVL |
| 321 | FL_18 | VH CDR1 | NARMGVS |
| 322 | FL_18 | VH CDR2 | HIFSNDEKSFSTSLKN |
| 323 | FL_18 | VH CDR3 | MVGYGSGWYAYFDY |
| 324 | FL_18 | VL CDR1 | RASQSISSYLN |
| 325 | FL_18 | VL CDR2 | AASSLQS |
| 326 | FL_18 | VL CDR3 | LQHNSYPLT |
| 327 | FL_18 | VH | QVTLKESGPVLVKPTQTLTLTCTFSGFSLSNARMGVSWIRQPPGKALEWLAHIFSNDEKSFSTSLKNRLTISKDTSKSQV |
| | | | VLTMTNMDPVDTATYYCARMVGYGSGWYAYFDYWGQGTQVTVSS |
| 328 | FL_18 | VL | DIQMTQSPSSLSASVGDRVTITCRASQSISSYLNWYQQKPGKAPKLLIYAASSLQSGVPSRFSGSGSGTDFTLTISSLQP |
| | | | EDFATYYCLQHNSYPLTFGGGTKVEIK |
| 329 | FL_18 | scFv | QVTLKESGPVLVKPTQTLTLTCTFSGFSLSNARMGVSWIRQPPGKALEWLAHIFSNDEKSFSTSLKNRLTISKDTSKSQV |
| | | | VLTMTNMDPVDTATYYCARMVGYGSGWYAYFDYWGQGTQVTVSSGGGGSGGGGSGGGGSDIQMTQSPSSLSASVGDRVTI |
| | | | TCRASQSISSYLNWYQQKPGKAPKLLIYAASSLQSGVPSRFSGSGSGTDFTLTISSLQPEDFATYYCLQHNSYPLTFGGG |
| | | | TKVEIK |
| 330 | FL_18 | bi- | QVTLKESGPVLVKPTQTLTLTCTFSGFSLSNARMGVSWIRQPPGKALEWLAHIFSNDEKSFSTSLKNRLTISKDTSKSQV |
| | | specific | VLTMTNMDPVDTATYYCARMVGYGSGWYAYFDYWGQGTQVTVSSGGGGSGGGGSGGGGSDIQMTQSPSSLSASVGDRVTI |
| | | molecule | TCRASQSISSYLNWYQQKPGKAPKLLIYAASSLQSGVPSRFSGSGSGTDFTLTISSLQPEDFATYYCLQHNSYPLTFGGG |
| | | | TKVEIKSGGGGSEVQLVESGGGLVQPGGSLKLSCAASGFTFNKYAMNWVRQAPGKGLEWVARIRSKYNNYATYYADSVKD |
| | | | RFTISRDDSKNTAYLQMNNLKTEDTAVYYCVRHGNFGNSYISYWAYWGQGTLVTVSSGGGGSGGGGSGGGGSQTVVTQEP |
| | | | SLTVSPGGTVTLTCGSSTGAVTSGNYPNWVQQKPGQAPRGLIGGTKFLAPGTPARFSGSLLGGKAALTLSGVQPEDEAEY |
| | | | YCVLWYSNRWVFGGGTKLTVL |
| 331 | FL_19 | VH CDR1 | YARMGVS |
| 332 | FL_19 | VH CDR2 | QIFSNDEKSYSTSLKS |
| 333 | FL_19 | VH CDR3 | IVGYGTGWYGYFDY |
| 334 | FL_19 | VL CDR1 | RASQDIGDDLG |
| 335 | FL_19 | VL CDR2 | AASTLQS |
| 336 | FL_19 | VL CDR3 | LQHNSYPLT |
| 337 | FL_19 | VH | QVTLKESGPTLVKPTETLTLTCTVSGFSLSYARMGVSWIRQPPGKALEWLAQIFSNDEKSYSTSLKSRLTISKDTSKSQV |
| | | | VLTMTDMDPEDTATYYCARIVGYGTGWYGYFDYWGQGTQVTVSS |
| 338 | FL_19 | VL | DIQMTQSPSSLSASVGDRVTITCRASQDIGDDLGWYQQKPGKAPKRLIYAASTLQSGVPFRFSGSGSGTDFTLTISSLQP |
| | | | EDFATYYCLQHNSYPLTFGGGTKVEIK |
| 339 | FL_19 | scFv | QVTLKESGPTLVKPTETLTLTCTVSGFSLSYARMGVSWIRQPPGKALEWLAQIFSNDEKSYSTSLKSRLTISKDTSKSQV |
| | | | VLTMTDMDPEDTATYYCARIVGYGTGWYGYFDYWGQGTQVTVSSGGGGSGGGGSGGGGSDIQMTQSPSSLSASVGDRVTI |
| | | | TCRASQDIGDDLGWYQQKPGKAPKRLIYAASTLQSGVPFRFSGSGSGTDFTLTISSLQPEDFATYYCLQHNSYPLTFGGG |
| | | | TKVEIK |
| 340 | FL_19 | bi- | QVTLKESGPTLVKPTETLTLTCTVSGFSLSYARMGVSWIRQPPGKALEWLAQIFSNDEKSYSTSLKSRLTISKDTSKSQV |
| | | specific | VLTMTDMDPEDTATYYCARIVGYGTGWYGYFDYWGQGTQVTVSSGGGGSGGGGSGGGGSDIQMTQSPSSLSASVGDRVTI |
| | | molecule | TCRASQDIGDDLGWYQQKPGKAPKRLIYAASTLQSGVPFRFSGSGSGTDFTLTISSLQPEDFATYYCLQHNSYPLTFGGG |
| | | | TKVEIKSGGGGSEVQLVESGGGLVQPGGSLKLSCAASGFTFNKYAMNWVRQAPGKGLEWVARIRSKYNNYATYYADSVKD |
| | | | RFTISRDDSKNTAYLQMNNLKTEDTAVYYCVRHGNFGNSYISYWAYWGQGTLVTVSSGGGGSGGGGSGGGGSQTVVTQEP |
| | | | SLTVSPGGTVTLTCGSSTGAVTSGNYPNWVQQKPGQAPRGLIGGTKFLAPGTPARFSGSLLGGKAALTLSGVQPEDEAEY |
| | | | YCVLWYSNRWVFGGGTKLTVL |
| 341 | FL_20 | VH CDR1 | NARMAVS |
| 342 | FL_20 | VH CDR2 | HIFSNDEKSYSTSLKS |
| 343 | FL_20 | VH CDR3 | IVGYGTGWYGFFDY |
| 344 | FL_20 | VL CDR1 | RASQGIRNDLA |
| 345 | FL_20 | VL CDR2 | AASSLQS |
| 346 | FL_20 | VL CDR3 | LQHNSYPLT |
| 347 | FL_20 | VH | QVTLKESGPALVKPTETLTLTCTLSGFSLNNARMAVSWIRQPPGKTLEWLAHIFSNDEKSYSTSLKSRLTISKDTSKSQV |
| | | | VLTMTNMDPEDTATYYCARIVGYGTGWYGFFDYWGQGILVTVSS |
| 348 | FL_20 | VL | DIQMTQSPSSLSASVGDRVTITCRASQGIRNDLAWYQQKPGKAPKRLIYAASSLQSGVPSRFSGSGSGTEFTLTISSLQP |
| | | | EDFATYYCLQHNSYPLTFGGGTKVEIK |
| 349 | FL_20 | scFv | QVTLKESGPALVKPTETLTLTCTLSGFSLNNARMAVSWIRQPPGKTLEWLAHIFSNDEKSYSTSLKSRLTISKDTSKSQV |
| | | | VLTMTNMDPEDTATYYCARIVGYGTGWYGFFDYWGQGILVTVSSGGGGSGGGGSGGGGSDIQMTQSPSSLSASVGDRVTI |
| | | | TCRASQGIRNDLAWYQQKPGKAPKRLIYAASSLQSGVPSRFSGSGSGTEFTLTISSLQPEDFATYYCLQHNSYPLTFGGG |
| | | | TKVEIK |
| 350 | FL_20 | bi- | QVTLKESGPALVKPTETLTLTCTLSGFSLNNARMAVSWIRQPPGKTLEWLAHIFSNDEKSYSTSLKSRLTISKDTSKSQV |
| | | specific | VLTMTNMDPEDTATYYCARIVGYGTGWYGFFDYWGQGILVTVSSGGGGSGGGGSGGGGSDIQMTQSPSSLSASVGDRVTI |
| | | molecule | TCRASQGIRNDLAWYQQKPGKAPKRLIYAASSLQSGVPSRFSGSGSGTEFTLTISSLQPEDFATYYCLQHNSYPLTFGGG |
| | | | TKVEIKSGGGGSEVQLVESGGGLVQPGGSLKLSCAASGFTFNKYAMNWVRQAPGKGLEWVARIRSKYNNYATYYADSVKD |
| | | | RFTISRDDSKNTAYLQMNNLKTEDTAVYYCVRHGNFGNSYISYWAYWGQGTLVTVSSGGGGSGGGGSGGGGSQTVVTQEP |
| | | | SLTVSPGGTVTLTCGSSTGAVTSGNYPNWVQQKPGQAPRGLIGGTKFLAPGTPARFSGSLLGGKAALTLSGVQPEDEAEY |
| | | | YCVLWYSNRWVFGGGTKLTVL |
| 351 | FL_21 | VH CDR1 | NARMGVS |
| 352 | FL_21 | VH CDR2 | HIFSNDEKSYSTSLKS |
| 353 | FL_21 | VH CDR3 | IPGYGGNFYYHYYGMDV |
| 354 | FL_21 | VL CDR1 | RTSRGIRNDLG |
| 355 | FL_21 | VL CDR2 | AASTLQS |
| 356 | FL_21 | VL CDR3 | LQHNNFPWT |
| 357 | FL_21 | VH | QVTLKESGPALVKPTETLTLTCTFSGFSLSNARMGVSWIRQPPGKALEWLAHIFSNDEKSYSTSLKSRLTISKDTSKSQV |
| | | | VLTMTNMDPVDTATYYCARIPGYGGNFYYHYYGMDVWGQGTTVTVSS |
| 358 | FL_21 | VL | DIQMTQSPSSLSASVGDRVTITCRTSRGIRNDLGWYQQIPGRAPKRLIYAASTLQSGVPSRFSGSGSGTEFTLTISSLQP |
| | | | EDFATYYCLQHNNFPWTFGQGTKVEIK |
| 359 | FL_21 | scFv | QVTLKESGPALVKPTETLTLTCTFSGFSLSNARMGVSWIRQPPGKALEWLAHIFSNDEKSYSTSLKSRLTISKDTSKSQV |
| | | | VLTMTNMDPVDTATYYCARIPGYGGNFYYHYYGMDVWGQGTTVTVSSGGGGSGGGGSGGGGSDIQMTQSPSSLSASVGDR |
| | | | VTITCRTSRGIRNDLGWYQQIPGRAPKRLIYAASTLQSGVPSRFSGSGSGTEFTLTISSLQPEDFATYYCLQHNNFPWTF |
| | | | GQGTKVEIK |
| 360 | FL_21 | bi- | QVTLKESGPALVKPTETLTLTCTFSGFSLSNARMGVSWIRQPPGKALEWLAHIFSNDEKSYSTSLKSRLTISKDTSKSQV |
| | | specific | VLTMTNMDPVDTATYYCARIPGYGGNFYYHYYGMDVWGQGTTVTVSSGGGGSGGGGSGGGGSDIQMTQSPSSLSASVGDR |
| | | molecule | VTITCRTSRGIRNDLGWYQQIPGRAPKRLIYAASTLQSGVPSRFSGSGSGTEFTLTISSLQPEDFATYYCLQHNNFPWTF |
| | | | GQGTKVEIKSGGGGSEVQLVESGGGLVQPGGSLKLSCAASGFTFNKYAMNWVRQAPGKGLEWVARIRSKYNNYATYYADS |
| | | | VKDRFTISRDDSKNTAYLQMNNLKTEDTAVYYCVRHGNFGNSYISYWAYWGQGTLVTVSSGGGGSGGGGSGGGGSQTVVT |
| | | | QEPSLTVSPGGTVTLTCGSSTGAVTSGNYPNWVQQKPGQAPRGLIGGTKFLAPGTPARFSGSLLGGKAALTLSGVQPEDE |
| | | | AEYYCVLWYSNRWVFGGGTKLTVL |
| 361 | FL_22 | VH CDR1 | NARMGVS |
| 362 | FL_22 | VH CDR2 | HIFSNDEKSYSTSLKS |
| 363 | FL_22 | VH CDR3 | MPEYSSGWSGAFDI |
| 364 | FL_22 | VL CDR1 | RASQGISNYLA |
| 365 | FL_22 | VL CDR2 | AASTLQS |
| 366 | FL_22 | VL CDR3 | LQHNTYPWT |
| 367 | FL_22 | VH | QVTLKESGPVLVKPTETLTLTCTVSGFSFRNARMGVSWIRQPPGKALEWLAHIFSNDEKSYSTSLKSRLTISKDTSKSQV |
| | | | VLTLTNMDPVDTATYFCARMPEYSSGWSGAFDIWGQGTMVTVSS |
| 368 | FL_22 | VL | DIQMTQSPSSLSASVGDRVTITCRASQGISNYLAWYQQKPGKAPKRLIYAASTLQSGVPSRFSGSGSGTEFTLTISSLQP |
| | | | EDFATYYCLQHNTYPWTFGQGTKVEIK |
| 369 | FL_22 | scFv | QVTLKESGPVLVKPTETLTLTCTVSGFSFRNARMGVSWIRQPPGKALEWLAHIFSNDEKSYSTSLKSRLTISKDTSKSQV |
| | | | VLTLTNMDPVDTATYFCARMPEYSSGWSGAFDIWGQGTMVTVSSGGGGSGGGGSGGGGSDIQMTQSPSSLSASVGDRVTI |
| | | | TCRASQGISNYLAWYQQKPGKAPKRLIYAASTLQSGVPSRFSGSGSGTEFTLTISSLQPEDFATYYCLQHNTYPWTFGQG |
| | | | TKVEIK |
| 370 | FL_22 | bi- | QVTLKESGPVLVKPTETLTLTCTVSGFSFRNARMGVSWIRQPPGKALEWLAHIFSNDEKSYSTSLKSRLTISKDTSKSQV |
| | | specific | VLTLTNMDPVDTATYFCARMPEYSSGWSGAFDIWGQGTMVTVSSGGGGSGGGGSGGGGSDIQMTQSPSSLSASVGDRVTI |
| | | molecule | TCRASQGISNYLAWYQQKPGKAPKRLIYAASTLQSGVPSRFSGSGSGTEFTLTISSLQPEDFATYYCLQHNTYPWTFGQG |
| | | | TKVEIKSGGGGSEVQLVESGGGLVQPGGSLKLSCAASGFTFNKYAMNWVRQAPGKGLEWVARIRSKYNNYATYYADSVKD |
| | | | RFTISRDDSKNTAYLQMNNLKTEDTAVYYCVRHGNFGNSYISYWAYWGQGTLVTVSSGGGGSGGGGSGGGGSQTVVTQEP |
| | | | SLTVSPGGTVTLTCGSSTGAVTSGNYPNWVQQKPGQAPRGLIGGTKFLAPGTPARFSGSLLGGKAALTLSGVQPEDEAEY |
| | | | YCVLWYSNRWVFGGGTKLTVL |
| 371 | FL_23 | VH CDR1 | NARMGVS |
| 372 | FL_23 | VH CDR2 | HIFSNDEKSYSTSLKS |
| 373 | FL_23 | VH CDR3 | MPEYSSGWSGAFDI |
| 374 | FL_23 | VL CDR1 | RASQDIGYDLG |
| 375 | FL_23 | VL CDR2 | AASTLQS |
| 376 | FL_23 | VL CDR3 | LQHNSFPWT |
| 377 | FL_23 | VH | QVTLKESGPALVKPTETLTLTCTVSGFSFRNARMGVSWIRQPPGKALEWLAHIFSNDEKSYSTSLKSRLTISKDTSKSQV |
| | | | VLTLTNMDPVDTATYFCARMPEYSSGWSGAFDIWGQGTMVTVSS |
| 378 | FL_23 | VL | DIQMTQSPSSLSASVGDRVTITCRASQDIGYDLGWYQQKPGKAPKRLIYAASTLQSGVPSRFSGSGSGTEFTLIISSLQP |
| | | | EDFATYYCLQHNSFPWTFGQGTKVEIK |
| 379 | FL_23 | scFv | QVTLKESGPALVKPTETLTLTCTVSGFSFRNARMGVSWIRQPPGKALEWLAHIFSNDEKSYSTSLKSRLTISKDTSKSQV |
| | | | VLTLTNMDPVDTATYFCARMPEYSSGWSGAFDIWGQGTMVTVSSGGGGSGGGGSGGGGSDIQMTQSPSSLSASVGDRVTI |
| | | | TCRASQDIGYDLGWYQQKPGKAPKRLIYAASTLQSGVPSRFSGSGSGTEFTLIISSLQPEDFATYYCLQHNSFPWTFGQG |
| | | | TKVEIK |
| 380 | FL_23 | bi- | QVTLKESGPALVKPTETLTLTCTVSGFSFRNARMGVSWIRQPPGKALEWLAHIFSNDEKSYSTSLKSRLTISKDTSKSQV |
| | | specific | VLTLTNMDPVDTATYFCARMPEYSSGWSGAFDIWGQGTMVTVSSGGGGSGGGGSGGGGSDIQMTQSPSSLSASVGDRVTI |
| | | molecule | TCRASQDIGYDLGWYQQKPGKAPKRLIYAASTLQSGVPSRFSGSGSGTEFTLIISSLQPEDFATYYCLQHNSFPWTFGQG |
| | | | TKVEIKSGGGGSEVQLVESGGGLVQPGGSLKLSCAASGFTFNKYAMNWVRQAPGKGLEWVARIRSKYNNYATYYADSVKD |
| | | | RFTISRDDSKNTAYLQMNNLKTEDTAVYYCVRHGNFGNSYISYWAYWGQGTLVTVSSGGGGSGGGGSGGGGSQTVVTQEP |
| | | | SLTVSPGGTVTLTCGSSTGAVTSGNYPNWVQQKPGQAPRGLIGGTKFLAPGTPARFSGSLLGGKAALTLSGVQPEDEAEY |
| | | | YCVLWYSNRWVFGGGTKLTVL |
| 381 | FL_24 | VH CDR1 | NVRMGVS |
| 382 | FL_24 | VH CDR2 | HIFSNDEKSYSTSLKS |
| 383 | FL_24 | VH CDR3 | MPEYSSGWSGAFDI |
| 384 | FL_24 | VL CDR1 | RASQDIRDDLV |
| 385 | FL_24 | VL CDR2 | AASTLQS |
| 386 | FL_24 | VL CDR3 | LQHHSYPWT |
| 387 | FL_24 | VH | QVTLKESGPALVKPTETLTLTCTVSGFSLRNVRMGVSWIRQPPGKALEWLAHIFSNDEKSYSTSLKSRLTISKDTSKSQV |
| | | | VLILTNMDPVDTATYFCARMPEYSSGWSGAFDIWGQGTMVTVSS |
| 388 | FL_24 | VL | DIQMTQSPSSLSASVGDRVTITCRASQDIRDDLVWYQQKPGKAPKRLIYAASTLQSGVPSRFSGSGSGTEFTLTISSLQP |
| | | | EDFATYYCLQHHSYPWTFGQGTKVEIK |
| 389 | FL_24 | scFv | QVTLKESGPALVKPTETLTLTCTVSGFSLRNVRMGVSWIRQPPGKALEWLAHIFSNDEKSYSTSLKSRLTISKDTSKSQV |
| | | | VLILTNMDPVDTATYFCARMPEYSSGWSGAFDIWGQGTMVTVSSGGGGSGGGGSGGGGSDIQMTQSPSSLSASVGDRVTI |
| | | | TCRASQDIRDDLVWYQQKPGKAPKRLIYAASTLQSGVPSRFSGSGSGTEFTLTISSLQPEDFATYYCLQHHSYPWTFGQG |
| | | | TKVEIK |
| 390 | FL_24 | bi- | QVTLKESGPALVKPTETLTLTCTVSGFSLRNVRMGVSWIRQPPGKALEWLAHIFSNDEKSYSTSLKSRLTISKDTSKSQV |
| | | specific | VLILTNMDPVDTATYFCARMPEYSSGWSGAFDIWGQGTMVTVSSGGGGSGGGGSGGGGSDIQMTQSPSSLSASVGDRVTI |
| | | molecule | TCRASQDIRDDLVWYQQKPGKAPKRLIYAASTLQSGVPSRFSGSGSGTEFTLTISSLQPEDFATYYCLQHHSYPWTFGQG |
| | | | TKVEIKSGGGGSEVQLVESGGGLVQPGGSLKLSCAASGFTFNKYAMNWVRQAPGKGLEWVARIRSKYNNYATYYADSVKD |
| | | | RFTISRDDSKNTAYLQMNNLKTEDTAVYYCVRHGNFGNSYISYWAYWGQGTLVTVSSGGGGSGGGGSGGGGSQTVVTQEP |
| | | | SLTVSPGGTVTLTCGSSTGAVTSGNYPNWVQQKPGQAPRGLIGGTKFLAPGTPARFSGSLLGGKAALTLSGVQPEDEAEY |
| | | | YCVLWYSNRWVFGGGTKLTVL |
| 391 | FL_25 | VH CDR1 | NARMGVS |
| 392 | FL_25 | VH CDR2 | HIFSNDEKSYSTSLKS |
| 393 | FL_25 | VH CDR3 | MPEYSSGWSGAFDI |
| 394 | FL_25 | VL CDR1 | RASQDIRDDLG |
| 395 | FL_25 | VL CDR2 | AASTLQS |
| 396 | FL_25 | VL CDR3 | LQHNSFPFT |
| 397 | FL_25 | VH | QVTLKESGPALVKPTETLTLTCTVSGFSFRNARMGVSWIRQPPGKALEWLAHIFSNDEKSYSTSLKSRLTISKDTSKSQV |
| | | | VLTLTNMDPVDTATYFCARMPEYSSGWSGAFDIWGQGTMVTVSS |
| 398 | FL_25 | VL | DIQMTQSPSSLSASVGDRVTITCRASQDIRDDLGWYQQKPGKAPKRLIYAASTLQSGVPSRFTGGGSGTEFTLTISSLQP |
| | | | EDFATYYCLQHNSFPFTFGGGTKVEIK |
| 399 | FL_25 | scFv | QVTLKESGPALVKPTETLTLTCTVSGFSFRNARMGVSWIRQPPGKALEWLAHIFSNDEKSYSTSLKSRLTISKDTSKSQV |
| | | | VLTLTNMDPVDTATYFCARMPEYSSGWSGAFDIWGQGTMVTVSSGGGGSGGGGSGGGGSDIQMTQSPSSLSASVGDRVTI |
| | | | TCRASQDIRDDLGWYQQKPGKAPKRLIYAASTLQSGVPSRFTGGGSGTEFTLTISSLQPEDFATYYCLQHNSFPFTFGGG |
| | | | TKVEIK |
| 400 | FL_25 | bi- | QVTLKESGPALVKPTETLTLTCTVSGFSFRNARMGVSWIRQPPGKALEWLAHIFSNDEKSYSTSLKSRLTISKDTSKSQV |
| | | specific | VLTLTNMDPVDTATYFCARMPEYSSGWSGAFDIWGQGTMVTVSSGGGGSGGGGSGGGGSDIQMTQSPSSLSASVGDRVTI |
| | | molecule | TCRASQDIRDDLGWYQQKPGKAPKRLIYAASTLQSGVPSRFTGGGSGTEFTLTISSLQPEDFATYYCLQHNSFPFTFGGG |
| | | | TKVEIKSGGGGSEVQLVESGGGLVQPGGSLKLSCAASGFTFNKYAMNWVRQAPGKGLEWVARIRSKYNNYATYYADSVKD |
| | | | RFTISRDDSKNTAYLQMNNLKTEDTAVYYCVRHGNFGNSYISYWAYWGQGTLVTVSSGGGGSGGGGSGGGGSQTVVTQEP |
| | | | SLTVSPGGTVTLTCGSSTGAVTSGNYPNWVQQKPGQAPRGLIGGTKFLAPGTPARFSGSLLGGKAALTLSGVQPEDEAEY |
| | | | YCVLWYSNRWVFGGGTKLTVL |
| 401 | FL_26 | VH CDR1 | NARMGVS |
| 402 | FL_26 | VH CDR2 | HIFSNDEKSYSTSLKS |
| 403 | FL_26 | VH CDR3 | MPEYSSGWSGAFDI |
| 404 | FL_26 | VL CDR1 | RASQGIRNDLV |
| 405 | FL_26 | VL CDR2 | GTSTLQS |
| 406 | FL_26 | VL CDR3 | LQHNSYPLT |
| 407 | FL_26 | VH | QVTLKESGPVLVKPTETLTLTCTVSGFSFRNARMGVSWIRQPPGKALEWLAHIFSNDEKSYSTSLKSRLTISKDTSKSQV |
| | | | VLTLTNMDPVDTATYFCARMPEYSSGWSGAFDIWGQGTMVTVSS |
| 408 | FL_26 | VL | DIQMTQSPSSLSASVGDRVTITCRASQGIRNDLVWYQQKPGKAPKRLIYGTSTLQSGVPSRFSGSGSGTEFTLTISSLQP |
| | | | EDFATYYCLQHNSYPLTFGGGTKVEIK |
| 409 | FL_26 | scFv | QVTLKESGPVLVKPTETLTLTCTVSGFSFRNARMGVSWIRQPPGKALEWLAHIFSNDEKSYSTSLKSRLTISKDTSKSQV |
| | | | VLTLTNMDPVDTATYFCARMPEYSSGWSGAFDIWGQGTMVTVSSGGGGSGGGGSGGGGSDIQMTQSPSSLSASVGDRVTI |
| | | | TCRASQGIRNDLVWYQQKPGKAPKRLIYGTSTLQSGVPSRFSGSGSGTEFTLTISSLQPEDFATYYCLQHNSYPLTFGGG |
| | | | TKVEIK |
| 410 | FL_26 | bi- | QVTLKESGPVLVKPTETLTLTCTVSGFSFRNARMGVSWIRQPPGKALEWLAHIFSNDEKSYSTSLKSRLTISKDTSKSQV |
| | | specific | VLTLTNMDPVDTATYFCARMPEYSSGWSGAFDIWGQGTMVTVSSGGGGSGGGGSGGGGSDIQMTQSPSSLSASVGDRVTI |
| | | molecule | TCRASQGIRNDLVWYQQKPGKAPKRLIYGTSTLQSGVPSRFSGSGSGTEFTLTISSLQPEDFATYYCLQHNSYPLTFGGG |
| | | | TKVEIKSGGGGSEVQLVESGGGLVQPGGSLKLSCAASGFTFNKYAMNWVRQAPGKGLEWVARIRSKYNNYATYYADSVKD |
| | | | RFTISRDDSKNTAYLQMNNLKTEDTAVYYCVRHGNFGNSYISYWAYWGQGTLVTVSSGGGGSGGGGSGGGGSQTVVTQEP |
| | | | SLTVSPGGTVTLTCGSSTGAVTSGNYPNWVQQKPGQAPRGLIGGTKFLAPGTPARFSGSLLGGKAALTLSGVQPEDEAEY |
| | | | YCVLWYSNRWVFGGGTKLTVL |
| 411 | FL_27 | VH CDR1 | NARMGVS |
| 412 | FL_27 | VH CDR2 | HIFSNDEKSYSTSLKS |
| 413 | FL_27 | VH CDR3 | MPEYSSGWSGAFDI |
| 414 | FL_27 | VL CDR1 | RTSQGIRNDLV |
| 415 | FL_27 | VL CDR2 | AASTLQS |
| 416 | FL_27 | VL CDR3 | LQHYSYPLT |
| 417 | FL_27 | VH | QVTLKESGPVLVKPTETLTLTCTVSGFSFRNARMGVSWIRQPPGKALEWLAHIFSNDEKSYSTSLKSRLTISKDTSKSQV |
| | | | VLTLTNMDPVDTATYFCARMPEYSSGWSGAFDIWGQGTMVTVSS |
| 418 | FL_27 | VL | DIQMTQSPSSLSASVGDRVTITCRTSQGIRNDLVWYQQKPGKAPKRLIYAASTLQSGVPSRFSGSGSGTEFTLTISSLQP |
| | | | EDFATYFCLQHYSYPLTFGGGTKVEIK |
| 419 | FL_27 | scFv | QVTLKESGPVLVKPTETLTLTCTVSGFSFRNARMGVSWIRQPPGKALEWLAHIFSNDEKSYSTSLKSRLTISKDTSKSQV |
| | | | VLTLTNMDPVDTATYFCARMPEYSSGWSGAFDIWGQGTMVTVSSGGGGSGGGGSGGGGSDIQMTQSPSSLSASVGDRVTI |
| | | | TCRTSQGIRNDLVWYQQKPGKAPKRLIYAASTLQSGVPSRFSGSGSGTEFTLTISSLQPEDFATYFCLQHYSYPLTFGGG |
| | | | TKVEIK |
| 420 | FL_27 | bi- | QVTLKESGPVLVKPTETLTLTCTVSGFSFRNARMGVSWIRQPPGKALEWLAHIFSNDEKSYSTSLKSRLTISKDTSKSQV |
| | | specific | VLTLTNMDPVDTATYFCARMPEYSSGWSGAFDIWGQGTMVTVSSGGGGSGGGGSGGGGSDIQMTQSPSSLSASVGDRVTI |
| | | molecule | TCRTSQGIRNDLVWYQQKPGKAPKRLIYAASTLQSGVPSRFSGSGSGTEFTLTISSLQPEDFATYFCLQHYSYPLTFGGG |
| | | | TKVEIKSGGGGSEVQLVESGGGLVQPGGSLKLSCAASGFTFNKYAMNWVRQAPGKGLEWVARIRSKYNNYATYYADSVKD |
| | | | RFTISRDDSKNTAYLQMNNLKTEDTAVYYCVRHGNFGNSYISYWAYWGQGTLVTVSSGGGGSGGGGSGGGGSQTVVTQEP |
| | | | SLTVSPGGTVTLTCGSSTGAVTSGNYPNWVQQKPGQAPRGLIGGTKFLAPGTPARFSGSLLGGKAALTLSGVQPEDEAEY |
| | | | YCVLWYSNRWVFGGGTKLTVL |
| 421 | FL_28 | VH CDR1 | NARMGVS |
| 422 | FL_28 | VH CDR2 | HIFSNDEKSYSTSLKS |
| 423 | FL_28 | VH CDR3 | MPEYSSGWSGAFDI |
| 424 | FL_28 | VL CDR1 | RASQGIGDDLG |
| 425 | FL_28 | VL CDR2 | ATSVLQS |
| 426 | FL_28 | VL CDR3 | LQHNSYPLT |
| 427 | FL_28 | VH | QVTLKESGPVLVKPTETLTLTCTVSGFSFRNARMGVSWIRQPPGKALEWLAHIFSNDEKSYSTSLKSRLTISKDTSKSQV |
| | | | VLTLTNMDPVDTATYFCARMPEYSSGWSGAFDIWGQGTMVTVSS |
| 428 | FL_28 | VL | DIQMTQSPSSLSASVGDRVTITCRASQGIGDDLGWYQQIPGKAPKRLIYATSVLQSGVPSRFSGSGSGTEFTLTISSLQP |
| | | | EDFATYYCLQHNSYPLTFGGGTKVEIK |
| 429 | FL_28 | scFv | QVTLKESGPVLVKPTETLTLTCTVSGFSFRNARMGVSWIRQPPGKALEWLAHIFSNDEKSYSTSLKSRLTISKDTSKSQV |
| | | | VLTLTNMDPVDTATYFCARMPEYSSGWSGAFDIWGQGTMVTVSSGGGGSGGGGSGGGGSDIQMTQSPSSLSASVGDRVTI |
| | | | TCRASQGIGDDLGWYQQIPGKAPKRLIYATSVLQSGVPSRFSGSGSGTEFTLTISSLQPEDFATYYCLQHNSYPLTFGGG |
| | | | TKVEIK |
| 430 | FL_28 | bi- | QVTLKESGPVLVKPTETLTLTCTVSGFSFRNARMGVSWIRQPPGKALEWLAHIFSNDEKSYSTSLKSRLTISKDTSKSQV |
| | | specific | VLTLTNMDPVDTATYFCARMPEYSSGWSGAFDIWGQGTMVTVSSGGGGSGGGGSGGGGSDIQMTQSPSSLSASVGDRVTI |
| | | molecule | TCRASQGIGDDLGWYQQIPGKAPKRLIYATSVLQSGVPSRFSGSGSGTEFTLTISSLQPEDFATYYCLQHNSYPLTFGGG |
| | | | TKVEIKSGGGGSEVQLVESGGGLVQPGGSLKLSCAASGFTFNKYAMNWVRQAPGKGLEWVARIRSKYNNYATYYADSVKD |
| | | | RFTISRDDSKNTAYLQMNNLKTEDTAVYYCVRHGNFGNSYISYWAYWGQGTLVTVSSGGGGSGGGGSGGGGSQTVVTQEP |
| | | | SLTVSPGGTVTLTCGSSTGAVTSGNYPNWVQQKPGQAPRGLIGGTKFLAPGTPARFSGSLLGGKAALTLSGVQPEDEAEY |
| | | | YCVLWYSNRWVFGGGTKLTVL |
| 431 | FL_29 | VH CDR1 | NARMGVS |
| 432 | FL_29 | VH CDR2 | HIFSNDEKSYRTSLKS |
| 433 | FL_29 | VH CDR3 | IVGYGSGWYAYFDY |
| 434 | FL_29 | VL CDR1 | RASQGIRNDLG |
| 435 | FL_29 | VL CDR2 | AASSLQS |
| 436 | FL_29 | VL CDR3 | LQHNSYPLT |
| 437 | FL_29 | VH | QVTLKESGPALVKPTQTLTLTCTFSGFSLSNARMGVSWIRQPPGKALEWLAHIFSNDEKSYRTSLKSRLTISKDTSKSQV |
| | | | VLTMTNMDPVDTATYYCARIVGYGSGWYAYFDYWGQGTLVTVSS |
| 438 | FL_29 | VL | DIQMTQSPSSLSASVGDRVTITCRASQGIRNDLGWYQQKPGKAPKRLIYAASSLQSGVPSRFSGSGSGTEFTLTISSLQP |
| | | | EDFATYYCLQHNSYPLTFGGGTKVEIK |
| 439 | FL_29 | scFv | QVTLKESGPALVKPTQTLTLTCTFSGFSLSNARMGVSWIRQPPGKALEWLAHIFSNDEKSYRTSLKSRLTISKDTSKSQV |
| | | | VLTMTNMDPVDTATYYCARIVGYGSGWYAYFDYWGQGTLVTVSSGGGGSGGGGSGGGGSDIQMTQSPSSLSASVGDRVTI |
| | | | TCRASQGIRNDLGWYQQKPGKAPKRLIYAASSLQSGVPSRFSGSGSGTEFTLTISSLQPEDFATYYCLQHNSYPLTFGGG |
| | | | TKVEIK |
| 440 | FL_29 | bi- | QVTLKESGPALVKPTQTLTLTCTFSGFSLSNARMGVSWIRQPPGKALEWLAHIFSNDEKSYRTSLKSRLTISKDTSKSQV |
| | | specific | VLTMTNMDPVDTATYYCARIVGYGSGWYAYFDYWGQGTLVTVSSGGGGSGGGGSGGGGSDIQMTQSPSSLSASVGDRVTI |
| | | molecule | TCRASQGIRNDLGWYQQKPGKAPKRLIYAASSLQSGVPSRFSGSGSGTEFTLTISSLQPEDFATYYCLQHNSYPLTFGGG |
| | | | TKVEIKSGGGGSEVQLVESGGGLVQPGGSLKLSCAASGFTFNKYAMNWVRQAPGKGLEWVARIRSKYNNYATYYADSVKD |
| | | | RFTISRDDSKNTAYLQMNNLKTEDTAVYYCVRHGNFGNSYISYWAYWGQGTLVTVSSGGGGSGGGGSGGGGSQTVVTQEP |
| | | | SLTVSPGGTVTLTCGSSTGAVTSGNYPNWVQQKPGQAPRGLIGGTKFLAPGTPARFSGSLLGGKAALTLSGVQPEDEAEY |
| | | | YCVLWYSNRWVFGGGTKLTVL |
| 441 | FL_30 | VH CDR1 | NARMGVS |
| 442 | FL_30 | VH CDR2 | LIYWNDDKRYSPSLKS |
| 443 | FL_30 | VH CDR3 | MVGYGSGWYAYFDY |
| 444 | FL_30 | VL CDR1 | RASQGIRNDLG |
| 445 | FL_30 | VL CDR2 | AASSLQS |
| 446 | FL_30 | VL CDR3 | LQHNSYPLT |
| 447 | FL_30 | VH | QVTLKESGPVLVKPTQTLTLTCTFSGFSLSNARMGVSWIRQPPGKALEWLALIYWNDDKRYSPSLKSRLTITKDTSKNQV |
| | | | VLTMTNMDPVDTATYYCARMVGYGSGWYAYFDYWGQGTLVTVSS |
| 448 | FL_30 | VL | DIQMTQSPSSLSASVGDRVTITCRASQGIRNDLGWYQQKPGKAPKRLIYAASSLQSGVPSRFSGSGSGTEFTLTISSLQP |
| | | | EDFATYYCLQHNSYPLTFGGGTKVEIK |
| 449 | FL_30 | scFv | QVTLKESGPVLVKPTQTLTLTCTFSGFSLSNARMGVSWIRQPPGKALEWLALIYWNDDKRYSPSLKSRLTITKDTSKNQV |
| | | | VLTMTNMDPVDTATYYCARMVGYGSGWYAYFDYWGQGTLVTVSSGGGGSGGGGSGGGGSDIQMTQSPSSLSASVGDRVTI |
| | | | TCRASQGIRNDLGWYQQKPGKAPKRLIYAASSLQSGVPSRFSGSGSGTEFTLTISSLQPEDFATYYCLQHNSYPLTFGGG |
| | | | TKVEIK |
| 450 | FL_30 | bi- | QVTLKESGPVLVKPTQTLTLTCTFSGFSLSNARMGVSWIRQPPGKALEWLALIYWNDDKRYSPSLKSRLTITKDTSKNQV |
| | | specific | VLTMTNMDPVDTATYYCARMVGYGSGWYAYFDYWGQGTLVTVSSGGGGSGGGGSGGGGSDIQMTQSPSSLSASVGDRVTI |
| | | molecule | TCRASQGIRNDLGWYQQKPGKAPKRLIYAASSLQSGVPSRFSGSGSGTEFTLTISSLQPEDFATYYCLQHNSYPLTFGGG |
| | | | TKVEIKSGGGGSEVQLVESGGGLVQPGGSLKLSCAASGFTFNKYAMNWVRQAPGKGLEWVARIRSKYNNYATYYADSVKD |
| | | | RFTISRDDSKNTAYLQMNNLKTEDTAVYYCVRHGNFGNSYISYWAYWGQGTLVTVSSGGGGSGGGGSGGGGSQTVVTQEP |
| | | | SLTVSPGGTVTLTCGSSTGAVTSGNYPNWVQQKPGQAPRGLIGGTKFLAPGTPARFSGSLLGGKAALTLSGVQPEDEAEY |
| | | | YCVLWYSNRWVFGGGTKLTVL |
| 451 | FL_31 | VH CDR1 | NARMGVS |
| 452 | FL_31 | VH CDR2 | HIFSNDEKSYSTSLKS |
| 453 | FL_31 | VH CDR3 | IVGYGTGWYGFFDY |
| 454 | FL_31 | VL CDR1 | RTSQGIRNDLG |
| 455 | FL_31 | VL CDR2 | AASSLQS |
| 456 | FL_31 | VL CDR3 | LQHNSYPLT |
| 457 | FL_31 | VH | QVTLKESGPALVKPTQTLTLTCTFSGFSLSNARMGVSWIRQPPGKALEWLAHIFSNDEKSYSTSLKSRLTISKDTSKSQV |
| | | | VLTMTDMDPEDTATYYCARIVGYGTGWYGFFDYWGQGILVTVSS |
| 458 | FL_31 | VL | DIQMTQSPSSLSASVGDRVTITCRTSQGIRNDLGWYQQKPGKAPKRLIYAASSLQSGVPSRFSGSGSGTEFTLTISSLQP |
| | | | EDFATYYCLQHNSYPLTFGGGTKVEIK |
| 459 | FL_31 | scFv | QVTLKESGPALVKPTQTLTLTCTFSGFSLSNARMGVSWIRQPPGKALEWLAHIFSNDEKSYSTSLKSRLTISKDTSKSQV |
| | | | VLTMTDMDPEDTATYYCARIVGYGTGWYGFFDYWGQGILVTVSSGGGGSGGGGSGGGGSDIQMTQSPSSLSASVGDRVTI |
| | | | TCRTSQGIRNDLGWYQQKPGKAPKRLIYAASSLQSGVPSRFSGSGSGTEFTLTISSLQPEDFATYYCLQHNSYPLTFGGG |
| | | | TKVEIK |
| 460 | FL_31 | bi- | QVTLKESGPALVKPTQTLTLTCTFSGFSLSNARMGVSWIRQPPGKALEWLAHIFSNDEKSYSTSLKSRLTISKDTSKSQV |
| | | specific | VLTMTDMDPEDTATYYCARIVGYGTGWYGFFDYWGQGILVTVSSGGGGSGGGGSGGGGSDIQMTQSPSSLSASVGDRVTI |
| | | molecule | TCRTSQGIRNDLGWYQQKPGKAPKRLIYAASSLQSGVPSRFSGSGSGTEFTLTISSLQPEDFATYYCLQHNSYPLTFGGG |
| | | | TKVEIKSGGGGSEVQLVESGGGLVQPGGSLKLSCAASGFTFNKYAMNWVRQAPGKGLEWVARIRSKYNNYATYYADSVKD |
| | | | RFTISRDDSKNTAYLQMNNLKTEDTAVYYCVRHGNFGNSYISYWAYWGQGTLVTVSSGGGGSGGGGSGGGGSQTVVTQEP |
| | | | SLTVSPGGTVTLTCGSSTGAVTSGNYPNWVQQKPGQAPRGLIGGTKFLAPGTPARFSGSLLGGKAALTLSGVQPEDEAEY |
| | | | YCVLWYSNRWVFGGGTKLTVL |
| 461 | FL_32 | VH CDR1 | NARMGVS |
| 462 | FL_32 | VH CDR2 | HIFSNDEKSYSTSLKS |
| 463 | FL_32 | VH CDR3 | IVGYGSGWYGYFDY |
| 464 | FL_32 | VL CDR1 | RASQGIRNDLV |
| 465 | FL_32 | VL CDR2 | AASTLQS |
| 466 | FL_32 | VL CDR3 | LQHYSYPLT |
| 467 | FL_32 | VH | QVTLKESGPTLVKPTETLTLTCTVSGFSFRNARMGVSWIRQPPGKALEWLAHIFSNDEKSYSTSLKSRLTISKDTSKGQV |
| | | | VLTMTNMDPVDTATYYCARIVGYGSGWYGYFDYWGQGTLVTVSS |
| 468 | FL_32 | VL | DIQMTQSPSSLSASVGDRVTITCRASQGIRNDLVWYQQKPGKAPKRLIYAASTLQSGVPSRFSGSGSGTEFILTISSLQP |
| | | | EDFATYFCLQHYSYPLTFGGGTKLEIK |
| 469 | FL_32 | scFv | QVTLKESGPTLVKPTETLTLTCTVSGFSFRNARMGVSWIRQPPGKALEWLAHIFSNDEKSYSTSLKSRLTISKDTSKGQV |
| | | | VLTMTNMDPVDTATYYCARIVGYGSGWYGYFDYWGQGTLVTVSSGGGGSGGGGSGGGGSDIQMTQSPSSLSASVGDRVTI |
| | | | TCRASQGIRNDLVWYQQKPGKAPKRLIYAASTLQSGVPSRFSGSGSGTEFILTISSLQPEDFATYFCLQHYSYPLTFGGG |
| | | | TKLEIK |
| 470 | FL_32 | bi- | QVTLKESGPTLVKPTETLTLTCTVSGFSFRNARMGVSWIRQPPGKALEWLAHIFSNDEKSYSTSLKSRLTISKDTSKGQV |
| | | specific | VLTMTNMDPVDTATYYCARIVGYGSGWYGYFDYWGQGTLVTVSSGGGGSGGGGSGGGGSDIQMTQSPSSLSASVGDRVTI |
| | | molecule | TCRASQGIRNDLVWYQQKPGKAPKRLIYAASTLQSGVPSRFSGSGSGTEFILTISSLQPEDFATYFCLQHYSYPLTFGGG |
| | | | TKLEIKSGGGGSEVQLVESGGGLVQPGGSLKLSCAASGFTFNKYAMNWVRQAPGKGLEWVARIRSKYNNYATYYADSVKD |
| | | | RFTISRDDSKNTAYLQMNNLKTEDTAVYYCVRHGNFGNSYISYWAYWGQGTLVTVSSGGGGSGGGGSGGGGSQTVVTQEP |
| | | | SLTVSPGGTVTLTCGSSTGAVTSGNYPNWVQQKPGQAPRGLIGGTKFLAPGTPARFSGSLLGGKAALTLSGVQPEDEAEY |
| | | | YCVLWYSNRWVFGGGTKLTVL |
| 471 | FL_33 | VH CDR1 | NARMGVS |
| 472 | FL_33 | VH CDR2 | HIFSNDEKSYSTSLKS |
| 473 | FL_33 | VH CDR3 | IVGYGSGWYGYFDY |
| 474 | FL_33 | VL CDR1 | RASQGIGDDLG |
| 475 | FL_33 | VL CDR2 | ATSVLQS |
| 476 | FL_33 | VL CDR3 | LQHNSYPLT |
| 477 | FL_33 | VH | QVTLKESGPVLVKPTETLTLTCTVSGFSLRNARMGVSWIRQPPGKTLEWLAHIFSNDEKSYSTSLKSRLTISKDTSKGQV |
| | | | VLTMTNMDPVDTATYYCARIVGYGSGWYGYFDYWGQGTLVTVSS |
| 478 | FL_33 | VL | DIQMTQSPSSLSASVGDRVTITCRASQGIGDDLGWYQQIPGKAPKRLIYATSVLQSGVPSRFSGSGSGTEFTLTISSLQP |
| | | | EDFATYYCLQHNSYPLTFGGGTKLEIK |
| 479 | FL_33 | scFv | QVTLKESGPVLVKPTETLTLTCTVSGFSLRNARMGVSWIRQPPGKTLEWLAHIFSNDEKSYSTSLKSRLTISKDTSKGQV |
| | | | VLTMTNMDPVDTATYYCARIVGYGSGWYGYFDYWGQGTLVTVSSGGGGSGGGGSGGGGSDIQMTQSPSSLSASVGDRVTI |
| | | | TCRASQGIGDDLGWYQQIPGKAPKRLIYATSVLQSGVPSRFSGSGSGTEFTLTISSLQPEDFATYYCLQHNSYPLTFGGG |
| | | | TKLEIK |
| 480 | FL_33 | bi- | QVTLKESGPVLVKPTETLTLTCTVSGFSLRNARMGVSWIRQPPGKTLEWLAHIFSNDEKSYSTSLKSRLTISKDTSKGQV |
| | | specific | VLTMTNMDPVDTATYYCARIVGYGSGWYGYFDYWGQGTLVTVSSGGGGSGGGGSGGGGSDIQMTQSPSSLSASVGDRVTI |
| | | molecule | TCRASQGIGDDLGWYQQIPGKAPKRLIYATSVLQSGVPSRFSGSGSGTEFTLTISSLQPEDFATYYCLQHNSYPLTFGGG |
| | | | TKLEIKSGGGGSEVQLVESGGGLVQPGGSLKLSCAASGFTFNKYAMNWVRQAPGKGLEWVARIRSKYNNYATYYADSVKD |
| | | | RFTISRDDSKNTAYLQMNNLKTEDTAVYYCVRHGNFGNSYISYWAYWGQGTLVTVSSGGGGSGGGGSGGGGSQTVVTQEP |
| | | | SLTVSPGGTVTLTCGSSTGAVTSGNYPNWVQQKPGQAPRGLIGGTKFLAPGTPARFSGSLLGGKAALTLSGVQPEDEAEY |
| | | | YCVLWYSNRWVFGGGTKLTVL |
| 481 | FL_34 | VH CDR1 | NARMGVS |
| 482 | FL_34 | VH CDR2 | HIFWNDEKSYSTSLKS |
| 483 | FL_34 | VH CDR3 | IPYYGSGSYNYGMDV |
| 484 | FL_34 | VL CDR1 | RASQGIRNDLG |
| 485 | FL_34 | VL CDR2 | AASSLQS |
| 486 | FL_34 | VL CDR3 | LQHNSYPLT |
| 487 | FL_34 | VH | QVTLKESGPALVKPTETLTLTCTFSGFSLRNARMGVSWIRQPPGKALEWLAHIFWNDEKSYSTSLKSRLTISKDTSKSQV |
| | | | VLTMTNMDPVDTATYYCARIPYYGSGSYNYGMDVWGQGTTVTVSS |
| 488 | FL_34 | VL | DIQMTQSPSSLSASVGDRVTITCRASQGIRNDLGWYQQKPGKAPKRLIYAASSLQSGVPSRFSGSGSGTEFTLTISSLQP |
| | | | EDFATYYCLQHNSYPLTFGGGTKLEIK |
| 489 | FL_34 | scFv | QVTLKESGPALVKPTETLTLTCTFSGFSLRNARMGVSWIRQPPGKALEWLAHIFWNDEKSYSTSLKSRLTISKDTSKSQV |
| | | | VLTMTNMDPVDTATYYCARIPYYGSGSYNYGMDVWGQGTTVTVSSGGGGSGGGGSGGGGSDIQMTQSPSSLSASVGDRVT |
| | | | ITCRASQGIRNDLGWYQQKPGKAPKRLIYAASSLQSGVPSRFSGSGSGTEFTLTISSLQPEDFATYYCLQHNSYPLTFGG |
| | | | GTKLEIK |
| 490 | FL_34 | bi- | QVTLKESGPALVKPTETLTLTCTFSGFSLRNARMGVSWIRQPPGKALEWLAHIFWNDEKSYSTSLKSRLTISKDTSKSQV |
| | | specific | VLTMTNMDPVDTATYYCARIPYYGSGSYNYGMDVWGQGTTVTVSSGGGGSGGGGSGGGGSDIQMTQSPSSLSASVGDRVT |
| | | molecule | ITCRASQGIRNDLGWYQQKPGKAPKRLIYAASSLQSGVPSRFSGSGSGTEFTLTISSLQPEDFATYYCLQHNSYPLTFGG |
| | | | GTKLEIKSGGGGSEVQLVESGGGLVQPGGSLKLSCAASGFTFNKYAMNWVRQAPGKGLEWVARIRSKYNNYATYYADSVK |
| | | | DRFTISRDDSKNTAYLQMNNLKTEDTAVYYCVRHGNFGNSYISYWAYWGQGTLVTVSSGGGGSGGGGSGGGGSQTVVTQE |
| | | | PSLTVSPGGTVTLTCGSSTGAVTSGNYPNWVQQKPGQAPRGLIGGTKFLAPGTPARFSGSLLGGKAALTLSGVQPEDEAE |
| | | | YYCVLWYSNRWVFGGGTKLTVL |
| 491 | FL_35 | VH CDR1 | NARMGVS |
| 492 | FL_35 | VH CDR2 | HIFSNDEKSYSTSLKN |
| 493 | FL_35 | VH CDR3 | IVGYGTGWYGFFDY |
| 494 | FL_35 | VL CDR1 | RASQDIRDDLV |
| 495 | FL_35 | VL CDR2 | GTSTLQS |
| 496 | FL_35 | VL CDR3 | LQHHSYPLT |
| 497 | FL_35 | VH | QVTLKESGPALVKPTETLTLTCTVSGFSLNNARMGVSWIRQPPGKALEWLAHIFSNDEKSYSTSLKNRLTISKDSSKTQV |
| | | | VLTMTNVDPVDTATYYCARIVGYGTGWYGFFDYWGQGTQVTVSS |
| 498 | FL_35 | VL | DIQMTQSPSSLSASVGDRVTITCRASQDIRDDLVWYQQKPGKAPKRLIYGTSTLQSGVPSRFSGSGSGTEFTLTISSLQP |
| | | | EDFATYYCLQHHSYPLTFGGGTKLEIK |
| 499 | FL_35 | scFv | QVTLKESGPALVKPTETLTLTCTVSGFSLNNARMGVSWIRQPPGKALEWLAHIFSNDEKSYSTSLKNRLTISKDSSKTQV |
| | | | VLTMTNVDPVDTATYYCARIVGYGTGWYGFFDYWGQGTQVTVSSGGGGSGGGGSGGGGSDIQMTQSPSSLSASVGDRVTI |
| | | | TCRASQDIRDDLVWYQQKPGKAPKRLIYGTSTLQSGVPSRFSGSGSGTEFTLTISSLQPEDFATYYCLQHHSYPLTFGGG |
| | | | TKLEIK |
| 500 | FL_35 | bi- | QVTLKESGPALVKPTETLTLTCTVSGFSLNNARMGVSWIRQPPGKALEWLAHIFSNDEKSYSTSLKNRLTISKDSSKTQV |
| | | specific | VLTMTNVDPVDTATYYCARIVGYGTGWYGFFDYWGQGTQVTVSSGGGGSGGGGSGGGGSDIQMTQSPSSLSASVGDRVTI |
| | | molecule | TCRASQDIRDDLVWYQQKPGKAPKRLIYGTSTLQSGVPSRFSGSGSGTEFTLTISSLQPEDFATYYCLQHHSYPLTFGGG |
| | | | TKLEIKSGGGGSEVQLVESGGGLVQPGGSLKLSCAASGFTFNKYAMNWVRQAPGKGLEWVARIRSKYNNYATYYADSVKD |
| | | | RFTISRDDSKNTAYLQMNNLKTEDTAVYYCVRHGNFGNSYISYWAYWGQGTLVTVSSGGGGSGGGGSGGGGSQTVVTQEP |
| | | | SLTVSPGGTVTLTCGSSTGAVTSGNYPNWVQQKPGQAPRGLIGGTKFLAPGTPARFSGSLLGGKAALTLSGVQPEDEAEY |
| | | | YCVLWYSNRWVFGGGTKLTVL |
| 501 | FL_36 | VH CDR1 | YARMGVS |
| 502 | FL_36 | VH CDR2 | HIFSNDEKSYSTSLKS |
| 503 | FL_36 | VH CDR3 | MPEYSSGWSGAFDI |
| 504 | FL_36 | VL CDR1 | RASQDIRNDLA |
| 505 | FL_36 | VL CDR2 | AASSLQS |
| 506 | FL_36 | VL CDR3 | LQHNSYPLT |
| 507 | FL_36 | VH | QVTLKESGPTLVKPTETLTLTCTFSGFSLRYARMGVSWIRQPPGKALEWLAHIFSNDEKSYSTSLKSRLTISKDTSKSQV |
| | | | VLTLTNMDPVDTATYFCARMPEYSSGWSGAFDIWGQGTMVTVSS |
| 508 | FL_36 | VL | DIQMTQSPSSLSASVGDRVTITCRASQDIRNDLAWYQQKPGKAPKRLIYAASSLQSGVPSRFSGSGSGTEFTLTISSLQP |
| | | | EDFATYYCLQHNSYPLTFGGGTKLEIK |
| 509 | FL_36 | scFv | QVTLKESGPTLVKPTETLTLTCTFSGFSLRYARMGVSWIRQPPGKALEWLAHIFSNDEKSYSTSLKSRLTISKDTSKSQV |
| | | | VLTLTNMDPVDTATYFCARMPEYSSGWSGAFDIWGQGTMVTVSSGGGGSGGGGSGGGGSDIQMTQSPSSLSASVGDRVTI |
| | | | TCRASQDIRNDLAWYQQKPGKAPKRLIYAASSLQSGVPSRFSGSGSGTEFTLTISSLQPEDFATYYCLQHNSYPLTFGGG |
| | | | TKLEIK |
| 510 | FL_36 | bi- | QVTLKESGPTLVKPTETLTLTCTFSGFSLRYARMGVSWIRQPPGKALEWLAHIFSNDEKSYSTSLKSRLTISKDTSKSQV |
| | | specific | VLTLTNMDPVDTATYFCARMPEYSSGWSGAFDIWGQGTMVTVSSGGGGSGGGGSGGGGSDIQMTQSPSSLSASVGDRVTI |
| | | molecule | TCRASQDIRNDLAWYQQKPGKAPKRLIYAASSLQSGVPSRFSGSGSGTEFTLTISSLQPEDFATYYCLQHNSYPLTFGGG |
| | | | TKLEIKSGGGGSEVQLVESGGGLVQPGGSLKLSCAASGFTFNKYAMNWVRQAPGKGLEWVARIRSKYNNYATYYADSVKD |
| | | | RFTISRDDSKNTAYLQMNNLKTEDTAVYYCVRHGNFGNSYISYWAYWGQGTLVTVSSGGGGSGGGGSGGGGSQTVVTQEP |
| | | | SLTVSPGGTVTLTCGSSTGAVTSGNYPNWVQQKPGQAPRGLIGGTKFLAPGTPARFSGSLLGGKAALTLSGVQPEDEAEY |
| | | | YCVLWYSNRWVFGGGTKLTVL |
| 511 | FL_37 | VH CDR1 | NIKMGVS |
| 512 | FL_37 | VH CDR2 | HIFSNDEKSYSTSLKS |
| 513 | FL_37 | VH CDR3 | MPEYSSGWSGAFDI |
| 514 | FL_37 | VL CDR1 | RASQDISNYLA |
| 515 | FL_37 | VL CDR2 | AASSLQS |
| 516 | FL_37 | VL CDR3 | LQHNSFPLT |
| 517 | FL_37 | VH | QVTLKESGPVLVKPTETLTLTCTVSGFSLRNIKMGVSWIRQPPGKALEWLAHIFSNDEKSYSTSLKSRLTISKDTSKSQV |
| | | | VLTLTNMDPVDTATYFCARMPEYSSGWSGAFDIWGQGTMVTVSS |
| 518 | FL_37 | VL | DIQMTQSPSSLSASVGDRVTITCRASQDISNYLAWYQQKPGKAPKRLIYAASSLQSGVPSRFSGSGSGTEFTLTISSLQP |
| | | | EDFATYYCLQHNSFPLTFGGGTKLEIK |
| 519 | FL_37 | scFv | QVTLKESGPVLVKPTETLTLTCTVSGFSLRNIKMGVSWIRQPPGKALEWLAHIFSNDEKSYSTSLKSRLTISKDTSKSQV |
| | | | VLTLTNMDPVDTATYFCARMPEYSSGWSGAFDIWGQGTMVTVSSGGGGSGGGGSGGGGSDIQMTQSPSSLSASVGDRVTI |
| | | | TCRASQDISNYLAWYQQKPGKAPKRLIYAASSLQSGVPSRFSGSGSGTEFTLTISSLQPEDFATYYCLQHNSFPLTFGGG |
| | | | TKLEIK |
| 520 | FL_37 | bi- | QVTLKESGPVLVKPTETLTLTCTVSGFSLRNIKMGVSWIRQPPGKALEWLAHIFSNDEKSYSTSLKSRLTISKDTSKSQV |
| | | specific | VLTLTNMDPVDTATYFCARMPEYSSGWSGAFDIWGQGTMVTVSSGGGGSGGGGSGGGGSDIQMTQSPSSLSASVGDRVTI |
| | | molecule | TCRASQDISNYLAWYQQKPGKAPKRLIYAASSLQSGVPSRFSGSGSGTEFTLTISSLQPEDFATYYCLQHNSFPLTFGGG |
| | | | TKLEIKSGGGGSEVQLVESGGGLVQPGGSLKLSCAASGFTFNKYAMNWVRQAPGKGLEWVARIRSKYNNYATYYADSVKD |
| | | | RFTISRDDSKNTAYLQMNNLKTEDTAVYYCVRHGNFGNSYISYWAYWGQGTLVTVSSGGGGSGGGGSGGGGSQTVVTQEP |
| | | | SLTVSPGGTVTLTCGSSTGAVTSGNYPNWVQQKPGQAPRGLIGGTKFLAPGTPARFSGSLLGGKAALTLSGVQPEDEAEY |
| | | | YCVLWYSNRWVFGGGTKLTVL |
| 521 | FL_38 | VH CDR1 | NARMGVS |
| 522 | FL_38 | VH CDR2 | HIFSNDEKSYSTSLKS |
| 523 | FL_38 | VH CDR3 | MPEYSSGWSGAFDI |
| 524 | FL_38 | VL CDR1 | RASQGIRNDLG |
| 525 | FL_38 | VL CDR2 | AASSLQS |
| 526 | FL_38 | VL CDR3 | LQHNSYPLT |
| 527 | FL_38 | VH | QVTLKESGPVLVKPTETLTLTCTVSGFSFRNARMGVSWIRQPPGKALEWLAHIFSNDEKSYSTSLKSRLTISKDTSKSQV |
| | | | VLTLTNMDPVDTATYFCARMPEYSSGWSGAFDIWGQGTLVTVSS |
| 528 | FL_38 | VL | DIQMTQSPSSLSASVGDRVTITCRASQGIRNDLGWYQQKPGKAPKRLIYAASSLQSGVPSRFSGSGSGTEFTLTISSLQP |
| | | | EDFATYYCLQHNSYPLTFGGGTKLEIK |
| 529 | FL_38 | scFv | QVTLKESGPVLVKPTETLTLTCTVSGFSFRNARMGVSWIRQPPGKALEWLAHIFSNDEKSYSTSLKSRLTISKDTSKSQV |
| | | | VLTLTNMDPVDTATYFCARMPEYSSGWSGAFDIWGQGTLVTVSSGGGGSGGGGSGGGGSDIQMTQSPSSLSASVGDRVTI |
| | | | TCRASQGIRNDLGWYQQKPGKAPKRLIYAASSLQSGVPSRFSGSGSGTEFTLTISSLQPEDFATYYCLQHNSYPLTFGGG |
| | | | TKLEIK |
| 530 | FL_38 | bi- | QVTLKESGPVLVKPTETLTLTCTVSGFSFRNARMGVSWIRQPPGKALEWLAHIFSNDEKSYSTSLKSRLTISKDTSKSQV |
| | | specific | VLTLTNMDPVDTATYFCARMPEYSSGWSGAFDIWGQGTLVTVSSGGGGSGGGGSGGGGSDIQMTQSPSSLSASVGDRVTI |
| | | molecule | TCRASQGIRNDLGWYQQKPGKAPKRLIYAASSLQSGVPSRFSGSGSGTEFTLTISSLQPEDFATYYCLQHNSYPLTFGGG |
| | | | TKLEIKSGGGGSEVQLVESGGGLVQPGGSLKLSCAASGFTFNKYAMNWVRQAPGKGLEWVARIRSKYNNYATYYADSVKD |
| | | | RFTISRDDSKNTAYLQMNNLKTEDTAVYYCVRHGNFGNSYISYWAYWGQGTLVTVSSGGGGSGGGGSGGGGSQTVVTQEP |
| | | | SLTVSPGGTVTLTCGSSTGAVTSGNYPNWVQQKPGQAPRGLIGGTKFLAPGTPARFSGSLLGGKAALTLSGVQPEDEAEY |
| | | | YCVLWYSNRWVFGGGTKLTVL |
| 531 | FL_39 | VH CDR1 | NARMGVS |
| 532 | FL_39 | VH CDR2 | HIFSNDEKSYSTSLKN |
| 533 | FL_39 | VH CDR3 | IVGYGSGWYGFFDY |
| 534 | FL_39 | VL CDR1 | RASQGIRNDLG |
| 535 | FL_39 | VL CDR2 | AASTLQS |
| 536 | FL_39 | VL CDR3 | LQHNSYPLT |
| 537 | FL_39 | VH | QVTLKESGPTLVKPTETLTLTCTLSGFSLNNARMGVSWIRQPPGKCLEWLAHIFSNDEKSYSTSLKNRLTISKDSSKTQV |
| | | | VLTMTNVDPVDTATYYCARIVGYGSGWYGFFDYWGQGTLVTVSS |
| 538 | FL_39 | VL | DIQMTQSPSSLSASVGDRVTITCRASQGIRNDLGWYQQKPGKAPKRLIYAASTLQSGVPSRFSGSGSGTEFTLTISSLQP |
| | | | EDFATYYCLQHNSYPLTFGCGTKVEIK |
| 539 | FL_39 | scFv | QVTLKESGPTLVKPTETLTLTCTLSGFSLNNARMGVSWIRQPPGKCLEWLAHIFSNDEKSYSTSLKNRLTISKDSSKTQV |
| | | | VLTMTNVDPVDTATYYCARIVGYGSGWYGFFDYWGQGTLVTVSSGGGGSGGGGSGGGGSDIQMTQSPSSLSASVGDRVTI |
| | | | TCRASQGIRNDLGWYQQKPGKAPKRLIYAASTLQSGVPSRFSGSGSGTEFTLTISSLQPEDFATYYCLQHNSYPLTFGCG |
| | | | TKVEIK |
| 540 | FL_39 | bi- | QVTLKESGPTLVKPTETLTLTCTLSGFSLNNARMGVSWIRQPPGKCLEWLAHIFSNDEKSYSTSLKNRLTISKDSSKTQV |
| | | specific | VLTMTNVDPVDTATYYCARIVGYGSGWYGFFDYWGQGTLVTVSSGGGGSGGGGSGGGGSDIQMTQSPSSLSASVGDRVTI |
| | | molecule | TCRASQGIRNDLGWYQQKPGKAPKRLIYAASTLQSGVPSRFSGSGSGTEFTLTISSLQPEDFATYYCLQHNSYPLTFGCG |
| | | | TKVEIKSGGGGSEVQLVESGGGLVQPGGSLKLSCAASGFTFNKYAMNWVRQAPGKGLEWVARIRSKYNNYATYYADSVKD |
| | | | RFTISRDDSKNTAYLQMNNLKTEDTAVYYCVRHGNFGNSYISYWAYWGQGTLVTVSSGGGGSGGGGSGGGGSQTVVTQEP |
| | | | SLTVSPGGTVTLTCGSSTGAVTSGNYPNWVQQKPGQAPRGLIGGTKFLAPGTPARFSGSLLGGKAALTLSGVQPEDEAEY |
| | | | YCVLWYSNRWVFGGGTKLTVL |
| 541 | FL_40 | VH CDR1 | NARMGVS |
| 542 | FL_40 | VH CDR2 | NIFSNDEKSYSTSLKS |
| 543 | FL_40 | VH CDR3 | IVGYGSGWYGYFDY |
| 544 | FL_40 | VL CDR1 | RASQDIRNDLG |
| 545 | FL_40 | VL CDR2 | ATSIRQS |
| 546 | FL_40 | VL CDR3 | LQHNSFPLT |
| 547 | FL_40 | VH | QVTLKESGPTLVKPTETLTLTCTVSGFSLSNARMGVSWIRQPPGKCLEWLANIFSNDEKSYSTSLKSRLTISKGTSKSQV |
| | | | VLTMTNVNPVDTGTYYCARIVGYGSGWYGYFDYWGQGTLVTVSS |
| 548 | FL_40 | VL | DIQMTQSPSSLSASVGDRVTITCRASQDIRNDLGWYQQKPGKAPKRLIYATSIRQSGVPSRFTGSGSGTEFTLTISGLQP |
| | | | EDFATYFCLQHNSFPLTFGCGTKVEIK |
| 549 | FL_40 | scFv | QVTLKESGPTLVKPTETLTLTCTVSGFSLSNARMGVSWIRQPPGKCLEWLANIFSNDEKSYSTSLKSRLTISKGTSKSQV |
| | | | VLTMTNVNPVDTGTYYCARIVGYGSGWYGYFDYWGQGTLVTVSSGGGGSGGGGSGGGGSDIQMTQSPSSLSASVGDRVTI |
| | | | TCRASQDIRNDLGWYQQKPGKAPKRLIYATSIRQSGVPSRFTGSGSGTEFTLTISGLQPEDFATYFCLQHNSFPLTFGCG |
| | | | TKVEIK |
| 550 | FL_40 | bi- | QVTLKESGPTLVKPTETLTLTCTVSGFSLSNARMGVSWIRQPPGKCLEWLANIFSNDEKSYSTSLKSRLTISKGTSKSQV |
| | | specific | VLTMTNVNPVDTGTYYCARIVGYGSGWYGYFDYWGQGTLVTVSSGGGGSGGGGSGGGGSDIQMTQSPSSLSASVGDRVTI |
| | | molecule | TCRASQDIRNDLGWYQQKPGKAPKRLIYATSIRQSGVPSRFTGSGSGTEFTLTISGLQPEDFATYFCLQHNSFPLTFGCG |
| | | | TKVEIKSGGGGSEVQLVESGGGLVQPGGSLKLSCAASGFTFNKYAMNWVRQAPGKGLEWVARIRSKYNNYATYYADSVKD |
| | | | RFTISRDDSKNTAYLQMNNLKTEDTAVYYCVRHGNFGNSYISYWAYWGQGTLVTVSSGGGGSGGGGSGGGGSQTVVTQEP |
| | | | SLTVSPGGTVTLTCGSSTGAVTSGNYPNWVQQKPGQAPRGLIGGTKFLAPGTPARFSGSLLGGKAALTLSGVQPEDEAEY |
| | | | YCVLWYSNRWVFGGGTKLTVL |
| 551 | FL_41 | VH CDR1 | NARMGVS |
| 552 | FL_41 | VH CDR2 | HIFSNDEKSFSTSLKN |
| 553 | FL_41 | VH CDR3 | MVGYGSGWYAYFDY |
| 554 | FL_41 | VL CDR1 | RASQSISSYLN |
| 555 | FL_41 | VL CDR2 | AASSLQS |
| 556 | FL_41 | VL CDR3 | LQHNSYPLT |
| 557 | FL_41 | VH | QVTLKESGPVLVKPTQTLTLTCTFSGFSLSNARMGVSWIRQPPGKCLEWLAHIFSNDEKSFSTSLKNRLTISKDTSKSQV |
| | | | VLTMTNMDPVDTATYYCARMVGYGSGWYAYFDYWGQGTQVTVSS |
| 558 | FL_41 | VL | DIQMTQSPSSLSASVGDRVTITCRASQSISSYLNWYQQKPGKAPKLLIYAASSLQSGVPSRFSGSGSGTDFTLTISSLQP |
| | | | EDFATYYCLQHNSYPLTFGCGTKVEIK |
| 559 | FL_41 | scFv | QVTLKESGPVLVKPTQTLTLTCTFSGFSLSNARMGVSWIRQPPGKCLEWLAHIFSNDEKSFSTSLKNRLTISKDTSKSQV |
| | | | VLTMTNMDPVDTATYYCARMVGYGSGWYAYFDYWGQGTQVTVSSGGGGSGGGGSGGGGSDIQMTQSPSSLSASVGDRVTI |
| | | | TCRASQSISSYLNWYQQKPGKAPKLLIYAASSLQSGVPSRFSGSGSGTDFTLTISSLQPEDFATYYCLQHNSYPLTFGCG |
| | | | TKVEIK |
| 560 | FL_41 | bi- | QVTLKESGPVLVKPTQTLTLTCTFSGFSLSNARMGVSWIRQPPGKCLEWLAHIFSNDEKSFSTSLKNRLTISKDTSKSQV |
| | | specific | VLTMTNMDPVDTATYYCARMVGYGSGWYAYFDYWGQGTQVTVSSGGGGSGGGGSGGGGSDIQMTQSPSSLSASVGDRVTI |
| | | molecule | TCRASQSISSYLNWYQQKPGKAPKLLIYAASSLQSGVPSRFSGSGSGTDFTLTISSLQPEDFATYYCLQHNSYPLTFGCG |
| | | | TKVEIKSGGGGSEVQLVESGGGLVQPGGSLKLSCAASGFTFNKYAMNWVRQAPGKGLEWVARIRSKYNNYATYYADSVKD |
| | | | RFTISRDDSKNTAYLQMNNLKTEDTAVYYCVRHGNFGNSYISYWAYWGQGTLVTVSSGGGGSGGGGSGGGGSQTVVTQEP |
| | | | SLTVSPGGTVTLTCGSSTGAVTSGNYPNWVQQKPGQAPRGLIGGTKFLAPGTPARFSGSLLGGKAALTLSGVQPEDEAEY |
| | | | YCVLWYSNRWVFGGGTKLTVL |
| 561 | FL_42 | VH CDR1 | NARMAVS |
| 562 | FL_42 | VH CDR2 | HIFSNDEKSYSTSLKS |
| 563 | FL_42 | VH CDR3 | IVGYGTGWYGFFDY |
| 564 | FL_42 | VL CDR1 | RASQGIRNDLA |
| 565 | FL_42 | VL CDR2 | AASSLQS |
| 566 | FL_42 | VL CDR3 | LQHNSYPLT |
| 567 | FL_42 | VH | QVTLKESGPALVKPTETLTLTCTLSGFSLNNARMAVSWIRQPPGKCLEWLAHIFSNDEKSYSTSLKSRLTISKDTSKSQV |
| | | | VLTMTNMDPEDTATYYCARIVGYGTGWYGFFDYWGQGILVTVSS |
| 568 | FL_42 | VL | DIQMTQSPSSLSASVGDRVTITCRASQGIRNDLAWYQQKPGKAPKRLIYAASSLQSGVPSRFSGSGSGTEFTLTISSLQP |
| | | | EDFATYYCLQHNSYPLTFGCGTKVEIK |
| 569 | FL_42 | scFv | QVTLKESGPALVKPTETLTLTCTLSGFSLNNARMAVSWIRQPPGKCLEWLAHIFSNDEKSYSTSLKSRLTISKDTSKSQV |
| | | | VLTMTNMDPEDTATYYCARIVGYGTGWYGFFDYWGQGILVTVSSGGGGSGGGGSGGGGSDIQMTQSPSSLSASVGDRVTI |
| | | | TCRASQGIRNDLAWYQQKPGKAPKRLIYAASSLQSGVPSRFSGSGSGTEFTLTISSLQPEDFATYYCLQHNSYPLTFGCG |
| | | | TKVEIK |
| 570 | FL_42 | bi- | QVTLKESGPALVKPTETLTLTCTLSGFSLNNARMAVSWIRQPPGKCLEWLAHIFSNDEKSYSTSLKSRLTISKDTSKSQV |
| | | specific | VLTMTNMDPEDTATYYCARIVGYGTGWYGFFDYWGQGILVTVSSGGGGSGGGGSGGGGSDIQMTQSPSSLSASVGDRVTI |
| | | molecule | TCRASQGIRNDLAWYQQKPGKAPKRLIYAASSLQSGVPSRFSGSGSGTEFTLTISSLQPEDFATYYCLQHNSYPLTFGCG |
| | | | TKVEIKSGGGGSEVQLVESGGGLVQPGGSLKLSCAASGFTFNKYAMNWVRQAPGKGLEWVARIRSKYNNYATYYADSVKD |
| | | | RFTISRDDSKNTAYLQMNNLKTEDTAVYYCVRHGNFGNSYISYWAYWGQGTLVTVSSGGGGSGGGGSGGGGSQTVVTQEP |
| | | | SLTVSPGGTVTLTCGSSTGAVTSGNYPNWVQQKPGQAPRGLIGGTKFLAPGTPARFSGSLLGGKAALTLSGVQPEDEAEY |
| | | | YCVLWYSNRWVFGGGTKLTVL |
| 571 | FL_43 | VH CDR1 | NARMGVS |
| 572 | FL_43 | VH CDR2 | HIFSNDEKSYSTSLKS |
| 573 | FL_43 | VH CDR3 | MPEYSSGWSGAFDI |
| 574 | FL_43 | VL CDR1 | RASQGIRNDLV |
| 575 | FL_43 | VL CDR2 | GTSTLQS |
| 576 | FL_43 | VL CDR3 | LQHNSYPLT |
| 577 | FL_43 | VH | QVTLKESGPVLVKPTETLTLTCTVSGFSFRNARMGVSWIRQPPGKCLEWLAHIFSNDEKSYSTSLKSRLTISKDTSKSQV |
| | | | VLTLTNMDPVDTATYFCARMPEYSSGWSGAFDIWGQGTMVTVSS |
| 578 | FL_43 | VL | DIQMTQSPSSLSASVGDRVTITCRASQGIRNDLVWYQQKPGKAPKRLIYGTSTLQSGVPSRFSGSGSGTEFTLTISSLQP |
| | | | EDFATYYCLQHNSYPLTFGCGTKVEIK |
| 579 | FL_43 | scFv | QVTLKESGPVLVKPTETLTLTCTVSGFSFRNARMGVSWIRQPPGKCLEWLAHIFSNDEKSYSTSLKSRLTISKDTSKSQV |
| | | | VLTLTNMDPVDTATYFCARMPEYSSGWSGAFDIWGQGTMVTVSSGGGGSGGGGSGGGGSDIQMTQSPSSLSASVGDRVTI |
| | | | TCRASQGIRNDLVWYQQKPGKAPKRLIYGTSTLQSGVPSRFSGSGSGTEFTLTISSLQPEDFATYYCLQHNSYPLTFGCG |
| | | | TKVEIK |
| 580 | FL_43 | bi- | QVTLKESGPVLVKPTETLTLTCTVSGFSFRNARMGVSWIRQPPGKCLEWLAHIFSNDEKSYSTSLKSRLTISKDTSKSQV |
| | | specific | VLTLTNMDPVDTATYFCARMPEYSSGWSGAFDIWGQGTMVTVSSGGGGSGGGGSGGGGSDIQMTQSPSSLSASVGDRVTI |
| | | molecule | TCRASQGIRNDLVWYQQKPGKAPKRLIYGTSTLQSGVPSRFSGSGSGTEFTLTISSLQPEDFATYYCLQHNSYPLTFGCG |
| | | | TKVEIKSGGGGSEVQLVESGGGLVQPGGSLKLSCAASGFTFNKYAMNWVRQAPGKGLEWVARIRSKYNNYATYYADSVKD |
| | | | RFTISRDDSKNTAYLQMNNLKTEDTAVYYCVRHGNFGNSYISYWAYWGQGTLVTVSSGGGGSGGGGSGGGGSQTVVTQEP |
| | | | SLTVSPGGTVTLTCGSSTGAVTSGNYPNWVQQKPGQAPRGLIGGTKFLAPGTPARFSGSLLGGKAALTLSGVQPEDEAEY |
| | | | YCVLWYSNRWVFGGGTKLTVL |
| 581 | FL_44 | VH CDR1 | NARMGVS |
| 582 | FL_44 | VH CDR2 | HIFSNDEKSYSTSLKS |
| 583 | FL_44 | VH CDR3 | MPEYSSGWSGAFDI |
| 584 | FL_44 | VL CDR1 | RTSQGIRNDLV |
| 585 | FL_44 | VL CDR2 | AASTLQS |
| 586 | FL_44 | VL CDR3 | LQHYSYPLT |
| 587 | FL_44 | VH | QVTLKESGPVLVKPTETLTLTCTVSGFSFRNARMGVSWIRQPPGKCLEWLAHIFSNDEKSYSTSLKSRLTISKDTSKSQV |
| | | | VLTLTNMDPVDTATYFCARMPEYSSGWSGAFDIWGQGTMVTVSS |
| 588 | FL_44 | VL | DIQMTQSPSSLSASVGDRVTITCRTSQGIRNDLVWYQQKPGKAPKRLIYAASTLQSGVPSRFSGSGSGTEFTLTISSLQP |
| | | | EDFATYFCLQHYSYPLTFGCGTKVEIK |
| 589 | FL_44 | scFv | QVTLKESGPVLVKPTETLTLTCTVSGFSFRNARMGVSWIRQPPGKCLEWLAHIFSNDEKSYSTSLKSRLTISKDTSKSQV |
| | | | VLTLTNMDPVDTATYFCARMPEYSSGWSGAFDIWGQGTMVTVSSGGGGSGGGGSGGGGSDIQMTQSPSSLSASVGDRVTI |
| | | | TCRTSQGIRNDLVWYQQKPGKAPKRLIYAASTLQSGVPSRFSGSGSGTEFTLTISSLQPEDFATYFCLQHYSYPLTFGCG |
| | | | TKVEIK |
| 590 | FL_44 | bi- | QVTLKESGPVLVKPTETLTLTCTVSGFSFRNARMGVSWIRQPPGKCLEWLAHIFSNDEKSYSTSLKSRLTISKDTSKSQV |
| | | specific | VLTLTNMDPVDTATYFCARMPEYSSGWSGAFDIWGQGTMVTVSSGGGGSGGGGSGGGGSDIQMTQSPSSLSASVGDRVTI |
| | | molecule | TCRTSQGIRNDLVWYQQKPGKAPKRLIYAASTLQSGVPSRFSGSGSGTEFTLTISSLQPEDFATYFCLQHYSYPLTFGCG |
| | | | TKVEIKSGGGGSEVQLVESGGGLVQPGGSLKLSCAASGFTFNKYAMNWVRQAPGKGLEWVARIRSKYNNYATYYADSVKD |
| | | | RFTISRDDSKNTAYLQMNNLKTEDTAVYYCVRHGNFGNSYISYWAYWGQGTLVTVSSGGGGSGGGGSGGGGSQTVVTQEP |
| | | | SLTVSPGGTVTLTCGSSTGAVTSGNYPNWVQQKPGQAPRGLIGGTKFLAPGTPARFSGSLLGGKAALTLSGVQPEDEAEY |
| | | | YCVLWYSNRWVFGGGTKLTVL |
| 591 | FL_45 | VH CDR1 | NARMGVS |
| 592 | FL_45 | VH CDR2 | HIFSNDEKSYRTSLKS |
| 593 | FL_45 | VH CDR3 | IVGYGSGWYAYFDY |
| 594 | FL_45 | VL CDR1 | RASQGIRNDLG |
| 595 | FL_45 | VL CDR2 | AASSLQS |
| 596 | FL_45 | VL CDR3 | LQHNSYPLT |
| 597 | FL_45 | VH | QVTLKESGPALVKPTQTLTLTCTFSGFSLSNARMGVSWIRQPPGKCLEWLAHIFSNDEKSYRTSLKSRLTISKDTSKSQV |
| | | | VLTMTNMDPVDTATYYCARIVGYGSGWYAYFDYWGQGTLVTVSS |
| 598 | FL_45 | VL | DIQMTQSPSSLSASVGDRVTITCRASQGIRNDLGWYQQKPGKAPKRLIYAASSLQSGVPSRFSGSGSGTEFTLTISSLQP |
| | | | EDFATYYCLQHNSYPLTFGCGTKVEIK |
| 599 | FL_45 | scFv | QVTLKESGPALVKPTQTLTLTCTFSGFSLSNARMGVSWIRQPPGKCLEWLAHIFSNDEKSYRTSLKSRLTISKDTSKSQV |
| | | | VLTMTNMDPVDTATYYCARIVGYGSGWYAYFDYWGQGTLVTVSSGGGGSGGGGSGGGGSDIQMTQSPSSLSASVGDRVTI |
| | | | TCRASQGIRNDLGWYQQKPGKAPKRLIYAASSLQSGVPSRFSGSGSGTEFTLTISSLQPEDFATYYCLQHNSYPLTFGCG |
| | | | TKVEIK |
| 600 | FL_45 | bi- | QVTLKESGPALVKPTQTLTLTCTFSGFSLSNARMGVSWIRQPPGKCLEWLAHIFSNDEKSYRTSLKSRLTISKDTSKSQV |
| | | specific | VLTMTNMDPVDTATYYCARIVGYGSGWYAYFDYWGQGTLVTVSSGGGGSGGGGSGGGGSDIQMTQSPSSLSASVGDRVTI |
| | | molecule | TCRASQGIRNDLGWYQQKPGKAPKRLIYAASSLQSGVPSRFSGSGSGTEFTLTISSLQPEDFATYYCLQHNSYPLTFGCG |
| | | | TKVEIKSGGGGSEVQLVESGGGLVQPGGSLKLSCAASGFTFNKYAMNWVRQAPGKGLEWVARIRSKYNNYATYYADSVKD |
| | | | RFTISRDDSKNTAYLQMNNLKTEDTAVYYCVRHGNFGNSYISYWAYWGQGTLVTVSSGGGGSGGGGSGGGGSQTVVTQEP |
| | | | SLTVSPGGTVTLTCGSSTGAVTSGNYPNWVQQKPGQAPRGLIGGTKFLAPGTPARFSGSLLGGKAALTLSGVQPEDEAEY |
| | | | YCVLWYSNRWVFGGGTKLTVL |
| 601 | FL_46 | VH CDR1 | NARMGVS |
| 602 | FL_46 | VH CDR2 | LIYWNDDKRYSPSLKS |
| 603 | FL_46 | VH CDR3 | MVGYGSGWYAYFDY |
| 604 | FL_46 | VL CDR1 | RASQGIRNDLG |
| 605 | FL_46 | VL CDR2 | AASSLQS |
| 606 | FL_46 | VL CDR3 | LQHNSYPLT |
| 607 | FL_46 | VH | QVTLKESGPVLVKPTQTLTLTCTFSGFSLSNARMGVSWIRQPPGKCLEWLALIYWNDDKRYSPSLKSRLTITKDTSKNQV |
| | | | VLTMTNMDPVDTATYYCARMVGYGSGWYAYFDYWGQGTLVTVSS |
| 608 | FL_46 | VL | DIQMTQSPSSLSASVGDRVTITCRASQGIRNDLGWYQQKPGKAPKRLIYAASSLQSGVPSRFSGSGSGTEFTLTISSLQP |
| | | | EDFATYYCLQHNSYPLTFGCGTKVEIK |
| 609 | FL_46 | scFv | QVTLKESGPVLVKPTQTLTLTCTFSGFSLSNARMGVSWIRQPPGKCLEWLALIYWNDDKRYSPSLKSRLTITKDTSKNQV |
| | | | VLTMTNMDPVDTATYYCARMVGYGSGWYAYFDYWGQGTLVTVSSGGGGSGGGGSGGGGSDIQMTQSPSSLSASVGDRVTI |
| | | | TCRASQGIRNDLGWYQQKPGKAPKRLIYAASSLQSGVPSRFSGSGSGTEFTLTISSLQPEDFATYYCLQHNSYPLTFGCG |
| | | | TKVEIK |
| 610 | FL_46 | bi- | QVTLKESGPVLVKPTQTLTLTCTFSGFSLSNARMGVSWIRQPPGKCLEWLALIYWNDDKRYSPSLKSRLTITKDTSKNQV |
| | | specific | VLTMTNMDPVDTATYYCARMVGYGSGWYAYFDYWGQGTLVTVSSGGGGSGGGGSGGGGSDIQMTQSPSSLSASVGDRVTI |
| | | molecule | TCRASQGIRNDLGWYQQKPGKAPKRLIYAASSLQSGVPSRFSGSGSGTEFTLTISSLQPEDFATYYCLQHNSYPLTFGCG |
| | | | TKVEIKSGGGGSEVQLVESGGGLVQPGGSLKLSCAASGFTFNKYAMNWVRQAPGKGLEWVARIRSKYNNYATYYADSVKD |
| | | | RFTISRDDSKNTAYLQMNNLKTEDTAVYYCVRHGNFGNSYISYWAYWGQGTLVTVSSGGGGSGGGGSGGGGSQTVVTQEP |
| | | | SLTVSPGGTVTLTCGSSTGAVTSGNYPNWVQQKPGQAPRGLIGGTKFLAPGTPARFSGSLLGGKAALTLSGVQPEDEAEY |
| | | | YCVLWYSNRWVFGGGTKLTVL |
| 611 | FL_47 | VH CDR1 | NARMGVS |
| 612 | FL_47 | VH CDR2 | HIFSNDEKSYSTSLKS |
| 613 | FL_47 | VH CDR3 | IVGYGTGWYGFFDY |
| 614 | FL_47 | VL CDR1 | RTSQGIRNDLG |
| 615 | FL_47 | VL CDR2 | AASSLQS |
| 616 | FL_47 | VL CDR3 | LQHNSYPLT |
| 617 | FL_47 | VH | QVTLKESGPALVKPTQTLTLTCTFSGFSLSNARMGVSWIRQPPGKCLEWLAHIFSNDEKSYSTSLKSRLTISKDTSKSQV |
| | | | VLTMTDMDPEDTATYYCARIVGYGTGWYGFFDYWGQGILVTVSS |
| 618 | FL_47 | VL | DIQMTQSPSSLSASVGDRVTITCRTSQGIRNDLGWYQQKPGKAPKRLIYAASSLQSGVPSRFSGSGSGTEFTLTISSLQP |
| | | | EDFATYYCLQHNSYPLTFGCGTKVEIK |
| 619 | FL_47 | scFv | QVTLKESGPALVKPTQTLTLTCTFSGFSLSNARMGVSWIRQPPGKCLEWLAHIFSNDEKSYSTSLKSRLTISKDTSKSQV |
| | | | VLTMTDMDPEDTATYYCARIVGYGTGWYGFFDYWGQGILVTVSSGGGGSGGGGSGGGGSDIQMTQSPSSLSASVGDRVTI |
| | | | TCRTSQGIRNDLGWYQQKPGKAPKRLIYAASSLQSGVPSRFSGSGSGTEFTLTISSLQPEDFATYYCLQHNSYPLTFGCG |
| | | | TKVEIK |
| 620 | FL_47 | bi- | QVTLKESGPALVKPTQTLTLTCTFSGFSLSNARMGVSWIRQPPGKCLEWLAHIFSNDEKSYSTSLKSRLTISKDTSKSQV |
| | | specific | VLTMTDMDPEDTATYYCARIVGYGTGWYGFFDYWGQGILVTVSSGGGGSGGGGSGGGGSDIQMTQSPSSLSASVGDRVTI |
| | | molecule | TCRTSQGIRNDLGWYQQKPGKAPKRLIYAASSLQSGVPSRFSGSGSGTEFTLTISSLQPEDFATYYCLQHNSYPLTFGCG |
| | | | TKVEIKSGGGGSEVQLVESGGGLVQPGGSLKLSCAASGFTFNKYAMNWVRQAPGKGLEWVARIRSKYNNYATYYADSVKD |
| | | | RFTISRDDSKNTAYLQMNNLKTEDTAVYYCVRHGNFGNSYISYWAYWGQGTLVTVSSGGGGSGGGGSGGGGSQTVVTQEP |
| | | | SLTVSPGGTVTLTCGSSTGAVTSGNYPNWVQQKPGQAPRGLIGGTKFLAPGTPARFSGSLLGGKAALTLSGVQPEDEAEY |
| | | | YCVLWYSNRWVFGGGTKLTVL |
| 621 | FL_48 | VH CDR1 | NARMGVS |
| 622 | FL_48 | VH CDR2 | HIFWNDEKSYSTSLKS |
| 623 | FL_48 | VH CDR3 | IPYYGSGSYNYGMDV |
| 624 | FL_48 | VL CDR1 | RASQGIRNDLG |
| 625 | FL_48 | VL CDR2 | AASSLQS |
| 626 | FL_48 | VL CDR3 | LQHNTYPLT |
| 627 | FL_48 | VH | QVTLKESGPMLVKPTETLTLTCTFSGFSLRNARMGVSWIRQPPGKCLEWLAHIFWNDEKSYSTSLKSRLTISKDTSKSQV |
| | | | VLTMTNMDPVDTATYYCARIPYYGSGSYNYGMDVWGQGTTVTVSS |
| 628 | FL_48 | VL | DIQMTQSPSSLSASVGDRVTITCRASQGIRNDLGWYQQKPGKAPKRLIYAASSLQSGVPSRFSGSGSGTEFTLTISSLQP |
| | | | EDFATYYCLQHNTYPLTFGCGTKVDIK |
| 629 | FL_48 | scFv | QVTLKESGPMLVKPTETLTLTCTFSGFSLRNARMGVSWIRQPPGKCLEWLAHIFWNDEKSYSTSLKSRLTISKDTSKSQV |
| | | | VLTMTNMDPVDTATYYCARIPYYGSGSYNYGMDVWGQGTTVTVSSGGGGSGGGGSGGGGSDIQMTQSPSSLSASVGDRVT |
| | | | ITCRASQGIRNDLGWYQQKPGKAPKRLIYAASSLQSGVPSRFSGSGSGTEFTLTISSLQPEDFATYYCLQHNTYPLTFGC |
| | | | GTKVDIK |
| 630 | FL_48 | bi- | QVTLKESGPMLVKPTETLTLTCTFSGFSLRNARMGVSWIRQPPGKCLEWLAHIFWNDEKSYSTSLKSRLTISKDTSKSQV |
| | | specific | VLTMTNMDPVDTATYYCARIPYYGSGSYNYGMDVWGQGTTVTVSSGGGGSGGGGSGGGGSDIQMTQSPSSLSASVGDRVT |
| | | molecule | ITCRASQGIRNDLGWYQQKPGKAPKRLIYAASSLQSGVPSRFSGSGSGTEFTLTISSLQPEDFATYYCLQHNTYPLTFGC |
| | | | GTKVDIKSGGGGSEVQLVESGGGLVQPGGSLKLSCAASGFTFNKYAMNWVRQAPGKGLEWVARIRSKYNNYATYYADSVK |
| | | | DRFTISRDDSKNTAYLQMNNLKTEDTAVYYCVRHGNFGNSYISYWAYWGQGTLVTVSSGGGGSGGGGSGGGGSQTVVTQE |
| | | | PSLTVSPGGTVTLTCGSSTGAVTSGNYPNWVQQKPGQAPRGLIGGTKFLAPGTPARFSGSLLGGKAALTLSGVQPEDEAE |
| | | | YYCVLWYSNRWVFGGGTKLTVL |
| 631 | FL_49 | VH CDR1 | NARMGVS |
| 632 | FL_49 | VH CDR2 | HIFSNDEKSYSTSLKN |
| 633 | FL_49 | VH CDR3 | IVGYGTGWFGYFDY |
| 634 | FL_49 | VL CDR1 | RASQDIRTDLA |
| 635 | FL_49 | VL CDR2 | AASSLQS |
| 636 | FL_49 | VL CDR3 | LQHNRYPLT |
| 637 | FL_49 | VH | QVTLKESGPTLVKPTETLTLTCTVSGFSLNNARMGVSWIRQPPGKCLEWLAHIFSNDEKSYSTSLKNRLTISKDSSKTQV |
| | | | VLTMTNVDPVDTATYYCARIVGYGTGWFGYFDYWGQGTQVTVSS |
| 638 | FL_49 | VL | DIQMTQSPSSLSASVGDRVTITCRASQDIRTDLAWYQQKPGKAPKRLIYAASSLQSGVPSRFSGSGSGTEFTLTISSLQP |
| | | | EDFATYYCLQHNRYPLTFGCGTKVDIK |
| 639 | FL_49 | scFv | QVTLKESGPTLVKPTETLTLTCTVSGFSLNNARMGVSWIRQPPGKCLEWLAHIFSNDEKSYSTSLKNRLTISKDSSKTQV |
| | | | VLTMTNVDPVDTATYYCARIVGYGTGWFGYFDYWGQGTQVTVSSGGGGSGGGGSGGGGSDIQMTQSPSSLSASVGDRVTI |
| | | | TCRASQDIRTDLAWYQQKPGKAPKRLIYAASSLQSGVPSRFSGSGSGTEFTLTISSLQPEDFATYYCLQHNRYPLTFGCG |
| | | | TKVDIK |
| 640 | FL_49 | bi- | QVTLKESGPTLVKPTETLTLTCTVSGFSLNNARMGVSWIRQPPGKCLEWLAHIFSNDEKSYSTSLKNRLTISKDSSKTQV |
| | | specific | VLTMTNVDPVDTATYYCARIVGYGTGWFGYFDYWGQGTQVTVSSGGGGSGGGGSGGGGSDIQMTQSPSSLSASVGDRVTI |
| | | molecule | TCRASQDIRTDLAWYQQKPGKAPKRLIYAASSLQSGVPSRFSGSGSGTEFTLTISSLQPEDFATYYCLQHNRYPLTFGCG |
| | | | TKVDIKSGGGGSEVQLVESGGGLVQPGGSLKLSCAASGFTFNKYAMNWVRQAPGKGLEWVARIRSKYNNYATYYADSVKD |
| | | | RFTISRDDSKNTAYLQMNNLKTEDTAVYYCVRHGNFGNSYISYWAYWGQGTLVTVSSGGGGSGGGGSGGGGSQTVVTQEP |
| | | | SLTVSPGGTVTLTCGSSTGAVTSGNYPNWVQQKPGQAPRGLIGGTKFLAPGTPARFSGSLLGGKAALTLSGVQPEDEAEY |
| | | | YCVLWYSNRWVFGGGTKLTVL |
| 641 | FL_50 | VH CDR1 | NARMGVS |
| 642 | FL_50 | VH CDR2 | HIFSNDEKSYSTSLKS |
| 643 | FL_50 | VH CDR3 | IPGYGGNFYYHYYGMDV |
| 644 | FL_50 | VL CDR1 | RASQGIRNDLA |
| 645 | FL_50 | VL CDR2 | AASTVQS |
| 646 | FL_50 | VL CDR3 | LQHNSFPWT |
| 647 | FL_50 | VH | QVTLKESGPTLVKPTETLTLTCTVSGFSLSNARMGVSWIRQPPGKCLEWLAHIFSNDEKSYSTSLKSRLTISKDTSKSQV |
| | | | VLTMTNMDPVDTATYYCARIPGYGGNFYYHYYGMDVWGQGTTVTVSS |
| 648 | FL_50 | VL | DIQMTQSPSSLSASVGDRVTITCRASQGIRNDLAWYQQKPGKAPKRLIYAASTVQSGVPSRFSGSGSGTEFALTISSLQP |
| | | | EDFATYYCLQHNSFPWTFGCGTKVDIK |
| 649 | FL_50 | scFv | QVTLKESGPTLVKPTETLTLTCTVSGFSLSNARMGVSWIRQPPGKCLEWLAHIFSNDEKSYSTSLKSRLTISKDTSKSQV |
| | | | VLTMTNMDPVDTATYYCARIPGYGGNFYYHYYGMDVWGQGTTVTVSSGGGGSGGGGSGGGGSDIQMTQSPSSLSASVGDR |
| | | | VTITCRASQGIRNDLAWYQQKPGKAPKRLIYAASTVQSGVPSRFSGSGSGTEFALTISSLQPEDFATYYCLQHNSFPWTF |
| | | | GCGTKVDIK |
| 650 | FL_50 | bi- | QVTLKESGPTLVKPTETLTLTCTVSGFSLSNARMGVSWIRQPPGKCLEWLAHIFSNDEKSYSTSLKSRLTISKDTSKSQV |
| | | specific | VLTMTNMDPVDTATYYCARIPGYGGNFYYHYYGMDVWGQGTTVTVSSGGGGSGGGGSGGGGSDIQMTQSPSSLSASVGDR |
| | | molecule | VTITCRASQGIRNDLAWYQQKPGKAPKRLIYAASTVQSGVPSRFSGSGSGTEFALTISSLQPEDFATYYCLQHNSFPWTF |
| | | | GCGTKVDIKSGGGGSEVQLVESGGGLVQPGGSLKLSCAASGFTFNKYAMNWVRQAPGKGLEWVARIRSKYNNYATYYADS |
| | | | VKDRFTISRDDSKNTAYLQMNNLKTEDTAVYYCVRHGNFGNSYISYWAYWGQGTLVTVSSGGGGSGGGGSGGGGSQTVVT |
| | | | QEPSLTVSPGGTVTLTCGSSTGAVTSGNYPNWVQQKPGQAPRGLIGGTKFLAPGTPARFSGSLLGGKAALTLSGVQPEDE |
| | | | AEYYCVLWYSNRWVFGGGTKLTVL |
| 651 | FL_51 | VH CDR1 | NVRMGVS |
| 652 | FL_51 | VH CDR2 | HISSNDEKSYSTSLRS |
| 653 | FL_51 | VH CDR3 | MPGDSNTWRGFFDY |
| 654 | FL_51 | VL CDR1 | RTSQSVNNNLA |
| 655 | FL_51 | VL CDR2 | GASTRAT |
| 656 | FL_51 | VL CDR3 | LQHNSYPLT |
| 657 | FL_51 | VH | QVTLKESGPTLVKPTETLTLTCTVSGFSLRNVRMGVSWIRQPPGKCLEWLAHISSNDEKSYSTSLRSRLTISTDTSKSQV |
| | | | VLTMTNMDPVDTATYYCARMPGDSNTWRGFFDYWGQGTLVTVSS |
| 658 | FL_51 | VL | EIVMTQSPATLSVSPGERATLSCRTSQSVNNNLAWYQQKPGQAPRLLIYGASTRATGIPARFSGSGSGTEFTLTISSLQP |
| | | | EDFATYYCLQHNSYPLTFGCGTKVEIK |
| 659 | FL_51 | scFv | QVTLKESGPTLVKPTETLTLTCTVSGFSLRNVRMGVSWIRQPPGKCLEWLAHISSNDEKSYSTSLRSRLTISTDTSKSQV |
| | | | VLTMTNMDPVDTATYYCARMPGDSNTWRGFFDYWGQGTLVTVSSGGGGSGGGGSGGGGSEIVMTQSPATLSVSPGERATL |
| | | | SCRTSQSVNNNLAWYQQKPGQAPRLLIYGASTRATGIPARFSGSGSGTEFTLTISSLQPEDFATYYCLQHNSYPLTFGCG |
| | | | TKVEIK |
| 660 | FL_51 | bi- | QVTLKESGPTLVKPTETLTLTCTVSGFSLRNVRMGVSWIRQPPGKCLEWLAHISSNDEKSYSTSLRSRLTISTDTSKSQV |
| | | specific | VLTMTNMDPVDTATYYCARMPGDSNTWRGFFDYWGQGTLVTVSSGGGGSGGGGSGGGGSEIVMTQSPATLSVSPGERATL |
| | | molecule | SCRTSQSVNNNLAWYQQKPGQAPRLLIYGASTRATGIPARFSGSGSGTEFTLTISSLQPEDFATYYCLQHNSYPLTFGCG |
| | | | TKVEIKSGGGGSEVQLVESGGGLVQPGGSLKLSCAASGFTFNKYAMNWVRQAPGKGLEWVARIRSKYNNYATYYADSVKD |
| | | | RFTISRDDSKNTAYLQMNNLKTEDTAVYYCVRHGNFGNSYISYWAYWGQGTLVTVSSGGGGSGGGGSGGGGSQTVVTQEP |
| | | | SLTVSPGGTVTLTCGSSTGAVTSGNYPNWVQQKPGQAPRGLIGGTKFLAPGTPARFSGSLLGGKAALTLSGVQPEDEAEY |
| | | | YCVLWYSNRWVFGGGTKLTVL |
| 661 | FL_52 | VH CDR1 | YARMGVS |
| 662 | FL_52 | VH CDR2 | HIFSNDEKSYSTSLKS |
| 663 | FL_52 | VH CDR3 | MPEYSSGWSGAFDI |
| 664 | FL_52 | VL CDR1 | RASQDIRNDLA |
| 665 | FL_52 | VL CDR2 | AASSLQS |
| 666 | FL_52 | VL CDR3 | LQHNSYPLT |
| 667 | FL_52 | VH | QVTLKESGPTLVKPTETLTLTCTFSGFSLRYARMGVSWIRQPPGKCLEWLAHIFSNDEKSYSTSLKSRLTISKDTSKSQV |
| | | | VLTLTNMDPVDTATYFCARMPEYSSGWSGAFDIWGQGTMVTVSS |
| 668 | FL_52 | VL | DIQMTQSPSSLSASVGDRVTITCRASQDIRNDLAWYQQKPGKAPKRLIYAASSLQSGVPSRFSGSGSGTEFTLTISSLQP |
| | | | EDFATYYCLQHNSYPLTFGCGTKLEIK |
| 669 | FL_52 | scFv | QVTLKESGPTLVKPTETLTLTCTFSGFSLRYARMGVSWIRQPPGKCLEWLAHIFSNDEKSYSTSLKSRLTISKDTSKSQV |
| | | | VLTLTNMDPVDTATYFCARMPEYSSGWSGAFDIWGQGTMVTVSSGGGGSGGGGSGGGGSDIQMTQSPSSLSASVGDRVTI |
| | | | TCRASQDIRNDLAWYQQKPGKAPKRLIYAASSLQSGVPSRFSGSGSGTEFTLTISSLQPEDFATYYCLQHNSYPLTFGCG |
| | | | TKLEIK |
| 670 | FL_52 | bi- | QVTLKESGPTLVKPTETLTLTCTFSGFSLRYARMGVSWIRQPPGKCLEWLAHIFSNDEKSYSTSLKSRLTISKDTSKSQV |
| | | specific | VLTLTNMDPVDTATYFCARMPEYSSGWSGAFDIWGQGTMVTVSSGGGGSGGGGSGGGGSDIQMTQSPSSLSASVGDRVTI |
| | | molecule | TCRASQDIRNDLAWYQQKPGKAPKRLIYAASSLQSGVPSRFSGSGSGTEFTLTISSLQPEDFATYYCLQHNSYPLTFGCG |
| | | | TKLEIKSGGGGSEVQLVESGGGLVQPGGSLKLSCAASGFTFNKYAMNWVRQAPGKGLEWVARIRSKYNNYATYYADSVKD |
| | | | RFTISRDDSKNTAYLQMNNLKTEDTAVYYCVRHGNFGNSYISYWAYWGQGTLVTVSSGGGGSGGGGSGGGGSQTVVTQEP |
| | | | SLTVSPGGTVTLTCGSSTGAVTSGNYPNWVQQKPGQAPRGLIGGTKFLAPGTPARFSGSLLGGKAALTLSGVQPEDEAEY |
| | | | YCVLWYSNRWVFGGGTKLTVL |
| 671 | FL_53 | VH CDR1 | SYGMH |
| 672 | FL_53 | VH CDR2 | VISYDGSNEFYADSVKG |
| 673 | FL_53 | VH CDR3 | GGEITMVRGVIGYYYYGMDV |
| 674 | FL_53 | VL CDR1 | RTSQSISSYLN |
| 675 | FL_53 | VL CDR2 | AASSLQS |
| 676 | FL_53 | VL CDR3 | LQHNSYPLT |
| 677 | FL_53 | VH | QVQLVESGGGVVQPGRSLRLSCAASGFTFSSYGMHWVRQAPGKCLEWVAVISYDGSNEFYADSVKGRFTISRDNSKNTLY |
| | | | LQMNSLRAEDTAVYYCARGGEITMVRGVIGYYYYGMDVWGQGTTVTVSS |
| 678 | FL_53 | VL | DIQMTQSPSSLSASVGDRVTITCRTSQSISSYLNWYQQKPGKAPKLLIYAASSLQSGVPSRFSGSGSGTEFTLTISSLQP |
| | | | EDFATYYCLQHNSYPLTFGCGTKVDIK |
| 679 | FL_53 | scFv | QVQLVESGGGVVQPGRSLRLSCAASGFTFSSYGMHWVRQAPGKCLEWVAVISYDGSNEFYADSVKGRFTISRDNSKNTLY |
| | | | LQMNSLRAEDTAVYYCARGGEITMVRGVIGYYYYGMDVWGQGTTVTVSSGGGGSGGGGSGGGGSDIQMTQSPSSLSASVG |
| | | | DRVTITCRTSQSISSYLNWYQQKPGKAPKLLIYAASSLQSGVPSRFSGSGSGTEFTLTISSLQPEDFATYYCLQHNSYPL |
| | | | TFGCGTKVDIK |
| 680 | FL_53 | bi- | QVQLVESGGGVVQPGRSLRLSCAASGFTFSSYGMHWVRQAPGKCLEWVAVISYDGSNEFYADSVKGRFTISRDNSKNTLY |
| | | specific | LQMNSLRAEDTAVYYCARGGEITMVRGVIGYYYYGMDVWGQGTTVTVSSGGGGSGGGGSGGGGSDIQMTQSPSSLSASVG |
| | | molecule | DRVTITCRTSQSISSYLNWYQQKPGKAPKLLIYAASSLQSGVPSRFSGSGSGTEFTLTISSLQPEDFATYYCLQHNSYPL |
| | | | TFGCGTKVDIKSGGGGSEVQLVESGGGLVQPGGSLKLSCAASGFTFNKYAMNWVRQAPGKGLEWVARIRSKYNNYATYYA |
| | | | DSVKDRFTISRDDSKNTAYLQMNNLKTEDTAVYYCVRHGNFGNSYISYWAYWGQGTLVTVSSGGGGSGGGGSGGGGSQTV |
| | | | VTQEPSLTVSPGGTVTLTCGSSTGAVTSGNYPNWVQQKPGQAPRGLIGGTKFLAPGTPARFSGSLLGGKAALTLSGVQPE |
| | | | DEAEYYCVLWYSNRWVFGGGTKLTVL |
| 681 | FL_54 | VH CDR1 | SYGMH |
| 682 | FL_54 | VH CDR2 | VISYDGSNEFYADSVKG |
| 683 | FL_54 | VH CDR3 | GGEITMVRGVIGYYYYGMDV |
| 684 | FL_54 | VL CDR1 | RASQGVRNNLV |
| 685 | FL_54 | VL CDR2 | GASTRAT |
| 686 | FL_54 | VL CDR3 | LQHNSYPLT |
| 687 | FL_54 | VH | QVQLVESGGGVVQPGRSLRLSCAASGFTFSSYGMHWVRQAPGKCLEWVAVISYDGSNEFYADSVKGRFTISRDNSKNTLY |
| | | | LQMNSLRAEDTAVYYCARGGEITMVRGVIGYYYYGMDVWGQGTTVTVSS |
| 688 | FL_54 | VL | EIVMTQSPATLSVSPGERATLSCRASQGVRNNLVWYQQKPGQAPRLLIYGASTRATGIPARFSGSGSGTEFTLTISSLQS |
| | | | EDFATYYCLQHNSYPLTFGCGTKVEIK |
| 689 | FL_54 | scFv | QVQLVESGGGVVQPGRSLRLSCAASGFTFSSYGMHWVRQAPGKCLEWVAVISYDGSNEFYADSVKGRFTISRDNSKNTLY |
| | | | LQMNSLRAEDTAVYYCARGGEITMVRGVIGYYYYGMDVWGQGTTVTVSSGGGGSGGGGSGGGGSEIVMTQSPATLSVSPG |
| | | | ERATLSCRASQGVRNNLVWYQQKPGQAPRLLIYGASTRATGIPARFSGSGSGTEFTLTISSLQSEDFATYYCLQHNSYPL |
| | | | TFGCGTKVEIK |
| 690 | FL_54 | bi- | QVQLVESGGGVVQPGRSLRLSCAASGFTFSSYGMHWVRQAPGKCLEWVAVISYDGSNEFYADSVKGRFTISRDNSKNTLY |
| | | specific | LQMNSLRAEDTAVYYCARGGEITMVRGVIGYYYYGMDVWGQGTTVTVSSGGGGSGGGGSGGGGSEIVMTQSPATLSVSPG |
| | | molecule | ERATLSCRASQGVRNNLVWYQQKPGQAPRLLIYGASTRATGIPARFSGSGSGTEFTLTISSLQSEDFATYYCLQHNSYPL |
| | | | TFGCGTKVEIKSGGGGSEVQLVESGGGLVQPGGSLKLSCAASGFTFNKYAMNWVRQAPGKGLEWVARIRSKYNNYATYYA |
| | | | DSVKDRFTISRDDSKNTAYLQMNNLKTEDTAVYYCVRHGNFGNSYISYWAYWGQGTLVTVSSGGGGSGGGGSGGGGSQTV |
| | | | VTQEPSLTVSPGGTVTLTCGSSTGAVTSGNYPNWVQQKPGQAPRGLIGGTKFLAPGTPARFSGSLLGGKAALTLSGVQPE |
| | | | DEAEYYCVLWYSNRWVFGGGTKLTVL |
| 691 | FL_55 | VH CDR1 | SYGMH |
| 692 | FL_55 | VH CDR2 | VISYDGSNKYYADSVKG |
| 693 | FL_55 | VH CDR3 | SYGMDV |
| 694 | FL_55 | VL CDR1 | RASQGISSWLA |
| 695 | FL_55 | VL CDR2 | AASSLQS |
| 696 | FL_55 | VL CDR3 | QQANSFPWT |
| 697 | FL_55 | VH | QVQLVESGGGVVQPGRSLRLSCAASGFTFSSYGMHWVRQAPGKCLEWVAVISYDGSNKYYADSVKGRFTISRDNSKNTLY |
| | | | LQMNSLRAEDTAVYYCARSYGMDVWGQGTTVTVSS |
| 698 | FL_55 | VL | DIQMTQSPSSVSASVGDRVTITCRASQGISSWLAWYQQKPGKAPKLLIYAASSLQSGVPSRFSGSGSGTDFTLTISSLQP |
| | | | EDFATYYCQQANSFPWTFGCGTKLEIK |
| 699 | FL_55 | scFv | QVQLVESGGGVVQPGRSLRLSCAASGFTFSSYGMHWVRQAPGKCLEWVAVISYDGSNKYYADSVKGRFTISRDNSKNTLY |
| | | | LQMNSLRAEDTAVYYCARSYGMDVWGQGTTVTVSSGGGGSGGGGSGGGGSDIQMTQSPSSVSASVGDRVTITCRASQGIS |
| | | | SWLAWYQQKPGKAPKLLIYAASSLQSGVPSRFSGSGSGTDFTLTISSLQPEDFATYYCQQANSFPWTFGCGTKLEIK |
| 700 | FL_55 | bi- | QVQLVESGGGVVQPGRSLRLSCAASGFTFSSYGMHWVRQAPGKCLEWVAVISYDGSNKYYADSVKGRFTISRDNSKNTLY |
| | | specific | LQMNSLRAEDTAVYYCARSYGMDVWGQGTTVTVSSGGGGSGGGGSGGGGSDIQMTQSPSSVSASVGDRVTITCRASQGIS |
| | | molecule | SWLAWYQQKPGKAPKLLIYAASSLQSGVPSRFSGSGSGTDFTLTISSLQPEDFATYYCQQANSFPWTFGCGTKLEIKSGG |
| | | | GGSEVQLVESGGGLVQPGGSLKLSCAASGFTFNKYAMNWVRQAPGKGLEWVARIRSKYNNYATYYADSVKDRFTISRDDS |
| | | | KNTAYLQMNNLKTEDTAVYYCVRHGNFGNSYISYWAYWGQGTLVTVSSGGGGSGGGGSGGGGSQTVVTQEPSLTVSPGGT |
| | | | VTLTCGSSTGAVTSGNYPNWVQQKPGQAPRGLIGGTKFLAPGTPARFSGSLLGGKAALTLSGVQPEDEAEYYCVLWYSNR |
| | | | WVFGGGTKLTVL |
| 701 | FL_56 | VH CDR1 | NVRMGVS |
| 702 | FL_56 | VH CDR2 | HIFSNDEKLYTTSLKS |
| 703 | FL_56 | VH CDR3 | IVGYGTGWYGYFDY |
| 704 | FL_56 | VL CDR1 | RASQDIRDDLG |
| 705 | FL_56 | VL CDR2 | ATSIRQS |
| 706 | FL_56 | VL CDR3 | LQHHSFPLT |
| 707 | FL_56 | VH | QVTLKESGPVLVKPTETLTLTCTVSGFSLRNVRMGVSWIRQPPGKALEWLAHIFSNDEKLYTTSLKSRLTISKDTSKSQV |
| | | | VLTMTNMDPEDTATYYCARIVGYGTGWYGYFDYWGQGTQVTVSS |
| 708 | FL_56 | VL | DIQMTQSPSSLSASIGDRVTITCRASQDIRDDLGWYQREPGKAPKRLIYATSIRQSGVPSRFSGSGSGTEFTLTISGLQP |
| | | | EDFATYFCLQHHSFPLTFGGGTKVDIK |
| 709 | FL_56 | scFv | QVTLKESGPVLVKPTETLTLTCTVSGFSLRNVRMGVSWIRQPPGKALEWLAHIFSNDEKLYTTSLKSRLTISKDTSKSQV |
| | | | VLTMTNMDPEDTATYYCARIVGYGTGWYGYFDYWGQGTQVTVSSGGGGSGGGGSGGGGSDIQMTQSPSSLSASIGDRVTI |
| | | | TCRASQDIRDDLGWYQREPGKAPKRLIYATSIRQSGVPSRFSGSGSGTEFTLTISGLQPEDFATYFCLQHHSFPLTFGGG |
| | | | TKVDIK |
| 710 | FL_56 | bi- | QVTLKESGPVLVKPTETLTLTCTVSGFSLRNVRMGVSWIRQPPGKALEWLAHIFSNDEKLYTTSLKSRLTISKDTSKSQV |
| | | specific | VLTMTNMDPEDTATYYCARIVGYGTGWYGYFDYWGQGTQVTVSSGGGGSGGGGSGGGGSDIQMTQSPSSLSASIGDRVTI |
| | | molecule | TCRASQDIRDDLGWYQREPGKAPKRLIYATSIRQSGVPSRFSGSGSGTEFTLTISGLQPEDFATYFCLQHHSFPLTFGGG |
| | | | TKVDIKSGGGGSEVQLVESGGGLVQPGGSLKLSCAASGFTFNKYAMNWVRQAPGKGLEWVARIRSKYNNYATYYADSVKD |
| | | | RFTISRDDSKNTAYLQMNNLKTEDTAVYYCVRHGNFGNSYISYWAYWGQGTLVTVSSGGGGSGGGGSGGGGSQTVVTQEP |
| | | | SLTVSPGGTVTLTCGSSTGAVTSGNYPNWVQQKPGQAPRGLIGGTKFLAPGTPARFSGSLLGGKAALTLSGVQPEDEAEY |
| | | | YCVLWYSNRWVFGGGTKLTVL |
| 711 | FL_57 | VH CDR1 | YARMGVS |
| 712 | FL_57 | VH CDR2 | HISSNDEKSFSTALES |
| 713 | FL_57 | VH CDR3 | MPGDSNTWRGFFDY |
| 714 | FL_57 | VL CDR1 | RTSQTVTNSYIA |
| 715 | FL_57 | VL CDR2 | GTSTRAT |
| 716 | FL_57 | VL CDR3 | QKYGSSPLT |
| 717 | FL_57 | VH | QVTLKESGPTLVKPTETLTLTCTFSGFSLRYARMGVSWIRQPPGKALEWLAHISSNDEKSFSTALESRLTISTDTSKSQM |
| | | | VLTMTNVDPVDTATYYCARMPGDSNTWRGFFDYWGQGTLVTVSS |
| 718 | FL_57 | VL | EIVMTQSPGTLSLSPGERATLSCRTSQTVTNSYIAWYQQRPGQAPRLLIYGTSTRATGIPDRFSGSGSGTDFTLTISRLE |
| | | | PEDFAVYYCQKYGSSPLTFGGGTKLEIK |
| 719 | FL_57 | scFv | QVTLKESGPTLVKPTETLTLTCTFSGFSLRYARMGVSWIRQPPGKALEWLAHISSNDEKSFSTALESRLTISTDTSKSQM |
| | | | VLTMTNVDPVDTATYYCARMPGDSNTWRGFFDYWGQGTLVTVSSGGGGSGGGGSGGGGSEIVMTQSPGTLSLSPGERATL |
| | | | SCRTSQTVTNSYIAWYQQRPGQAPRLLIYGTSTRATGIPDRFSGSGSGTDFTLTISRLEPEDFAVYYCQKYGSSPLTFGG |
| | | | GTKLEIK |
| 720 | FL_57 | bi- | QVTLKESGPTLVKPTETLTLTCTFSGFSLRYARMGVSWIRQPPGKALEWLAHISSNDEKSFSTALESRLTISTDTSKSQM |
| | | specific | VLTMTNVDPVDTATYYCARMPGDSNTWRGFFDYWGQGTLVTVSSGGGGSGGGGSGGGGSEIVMTQSPGTLSLSPGERATL |
| | | molecule | SCRTSQTVTNSYIAWYQQRPGQAPRLLIYGTSTRATGIPDRFSGSGSGTDFTLTISRLEPEDFAVYYCQKYGSSPLTFGG |
| | | | GTKLEIKSGGGGSEVQLVESGGGLVQPGGSLKLSCAASGFTFNKYAMNWVRQAPGKGLEWVARIRSKYNNYATYYADSVK |
| | | | DRFTISRDDSKNTAYLQMNNLKTEDTAVYYCVRHGNFGNSYISYWAYWGQGTLVTVSSGGGGSGGGGSGGGGSQTVVTQE |
| | | | PSLTVSPGGTVTLTCGSSTGAVTSGNYPNWVQQKPGQAPRGLIGGTKFLAPGTPARFSGSLLGGKAALTLSGVQPEDEAE |
| | | | YYCVLWYSNRWVFGGGTKLTVL |
| 721 | FL_58 | VH CDR1 | NVRMGVS |
| 722 | FL_58 | VH CDR2 | HISSNDEKSYSTSLRS |
| 723 | FL_58 | VH CDR3 | MPGDSNTWRGFFDY |
| 724 | FL_58 | VL CDR1 | RTSQSVNNNLA |
| 725 | FL_58 | VL CDR2 | GASTRAT |
| 726 | FL_58 | VL CDR3 | LQHNSYPLT |
| 727 | FL_58 | VH | QVTLKESGPTLVKPTETLTLTCTVSGFSLRNVRMGVSWIRQPPGKALEWLAHISSNDEKSYSTSLRSRLTISTDTSKSQV |
| | | | VLTMTNMDPVDTATYYCARMPGDSNTWRGFFDYWGQGTLVTVSS |
| 728 | FL_58 | VL | EIVMTQSPATLSVSPGERATLSCRTSQSVNNNLAWYQQKPGQAPRLLIYGASTRATGIPARFSGSGSGTEFTLTISSLQP |
| | | | EDFATYYCLQHNSYPLTFGGGTKVEIK |
| 729 | FL_58 | scFv | QVTLKESGPTLVKPTETLTLTCTVSGFSLRNVRMGVSWIRQPPGKALEWLAHISSNDEKSYSTSLRSRLTISTDTSKSQV |
| | | | VLTMTNMDPVDTATYYCARMPGDSNTWRGFFDYWGQGTLVTVSSGGGGSGGGGSGGGGSEIVMTQSPATLSVSPGERATL |
| | | | SCRTSQSVNNNLAWYQQKPGQAPRLLIYGASTRATGIPARFSGSGSGTEFTLTISSLQPEDFATYYCLQHNSYPLTFGGG |
| | | | TKVEIK |
| 730 | FL_58 | bi- | QVTLKESGPTLVKPTETLTLTCTVSGFSLRNVRMGVSWIRQPPGKALEWLAHISSNDEKSYSTSLRSRLTISTDTSKSQV |
| | | specific | VLTMTNMDPVDTATYYCARMPGDSNTWRGFFDYWGQGTLVTVSSGGGGSGGGGSGGGGSEIVMTQSPATLSVSPGERATL |
| | | molecule | SCRTSQSVNNNLAWYQQKPGQAPRLLIYGASTRATGIPARFSGSGSGTEFTLTISSLQPEDFATYYCLQHNSYPLTFGGG |
| | | | TKVEIKSGGGGSEVQLVESGGGLVQPGGSLKLSCAASGFTFNKYAMNWVRQAPGKGLEWVARIRSKYNNYATYYADSVKD |
| | | | RFTISRDDSKNTAYLQMNNLKTEDTAVYYCVRHGNFGNSYISYWAYWGQGTLVTVSSGGGGSGGGGSGGGGSQTVVTQEP |
| | | | SLTVSPGGTVTLTCGSSTGAVTSGNYPNWVQQKPGQAPRGLIGGTKFLAPGTPARFSGSLLGGKAALTLSGVQPEDEAEY |
| | | | YCVLWYSNRWVFGGGTKLTVL |
| 731 | FL_59 | VH CDR1 | NVRMGVS |
| 732 | FL_59 | VH CDR2 | HIFSNDEKSYSTSLKS |
| 733 | FL_59 | VH CDR3 | MPEYSSGWSGAFDI |
| 734 | FL_59 | VL CDR1 | RASQDIRDDLG |
| 735 | FL_59 | VL CDR2 | GASTLQS |
| 736 | FL_59 | VL CDR3 | LQHNSYPLT |
| 737 | FL_59 | VH | QVTLKESGPMLVKPTETLTLTCTVSGFSLRNVRMGVSWIRQPPGKALEWLAHIFSNDEKSYSTSLKSRLTISKDTSKSQV |
| | | | VLTLTNMDPVDTATYFCARMPEYSSGWSGAFDIWGQGTMVTVSS |
| 738 | FL_59 | VL | DIQMTQSPSSLSASVGDRVTITCRASQDIRDDLGWYQQKPGNAPKRLIYGASTLQSGVPSRFSGSGSGTEFTLTISSLQP |
| | | | EDFATYYCLQHNSYPLTFGGGTRLEIK |
| 739 | FL_59 | scFv | QVTLKESGPMLVKPTETLTLTCTVSGFSLRNVRMGVSWIRQPPGKALEWLAHIFSNDEKSYSTSLKSRLTISKDTSKSQV |
| | | | VLTLTNMDPVDTATYFCARMPEYSSGWSGAFDIWGQGTMVTVSSGGGGSGGGGSGGGGSDIQMTQSPSSLSASVGDRVTI |
| | | | TCRASQDIRDDLGWYQQKPGNAPKRLIYGASTLQSGVPSRFSGSGSGTEFTLTISSLQPEDFATYYCLQHNSYPLTFGGG |
| | | | TRLEIK |
| 740 | FL_59 | bi- | QVTLKESGPMLVKPTETLTLTCTVSGFSLRNVRMGVSWIRQPPGKALEWLAHIFSNDEKSYSTSLKSRLTISKDTSKSQV |
| | | specific | VLTLTNMDPVDTATYFCARMPEYSSGWSGAFDIWGQGTMVTVSSGGGGSGGGGSGGGGSDIQMTQSPSSLSASVGDRVTI |
| | | molecule | TCRASQDIRDDLGWYQQKPGNAPKRLIYGASTLQSGVPSRFSGSGSGTEFTLTISSLQPEDFATYYCLQHNSYPLTFGGG |
| | | | TRLEIKSGGGGSEVQLVESGGGLVQPGGSLKLSCAASGFTFNKYAMNWVRQAPGKGLEWVARIRSKYNNYATYYADSVKD |
| | | | RFTISRDDSKNTAYLQMNNLKTEDTAVYYCVRHGNFGNSYISYWAYWGQGTLVTVSSGGGGSGGGGSGGGGSQTVVTQEP |
| | | | SLTVSPGGTVTLTCGSSTGAVTSGNYPNWVQQKPGQAPRGLIGGTKFLAPGTPARFSGSLLGGKAALTLSGVQPEDEAEY |
| | | | YCVLWYSNRWVFGGGTKLTVL |
| 741 | FL_60 | VH CDR1 | NARMGVS |
| 742 | FL_60 | VH CDR2 | HIFSNDEKSYSTSLKS |
| 743 | FL_60 | VH CDR3 | MVGYGSGWYAYFDY |
| 744 | FL_60 | VL CDR1 | RSSQSLLHSNGYNYLY |
| 745 | FL_60 | VL CDR2 | EVSNRFS |
| 746 | FL_60 | VL CDR3 | MQALQTPLT |
| 747 | FL_60 | VH | QVTLKESGPALVKPTQTLTLTCTFSGFSLSNARMGVSWIRQPPGKALEWLAHIFSNDEKSYSTSLKSRLTISKDTSKRQV |
| | | | VLTMTNMDPVDTATYYCARMVGYGSGWYAYFDYWGQGTLVTVSS |
| 748 | FL_60 | VL | DIVMTQTPLSLSVTPGQPASISCRSSQSLLHSNGYNYLYWYLQKPGQPPQLLIYEVSNRFSGVPDRFSGSGSGTDFTLKI |
| | | | SRVEAEDVGVYYCMQALQTPLTFGGGTKVEIK |
| 749 | FL_60 | scFv | QVTLKESGPALVKPTQTLTLTCTFSGFSLSNARMGVSWIRQPPGKALEWLAHIFSNDEKSYSTSLKSRLTISKDTSKRQV |
| | | | VLTMTNMDPVDTATYYCARMVGYGSGWYAYFDYWGQGTLVTVSSGGGGSGGGGSGGGGSDIVMTQTPLSLSVTPGQPASI |
| | | | SCRSSQSLLHSNGYNYLYWYLQKPGQPPQLLIYEVSNRFSGVPDRFSGSGSGTDFTLKISRVEAEDVGVYYCMQALQTPL |
| | | | TFGGGTKVEIK |
| 750 | FL_60 | bi- | QVTLKESGPALVKPTQTLTLTCTFSGFSLSNARMGVSWIRQPPGKALEWLAHIFSNDEKSYSTSLKSRLTISKDTSKRQV |
| | | specific | VLTMTNMDPVDTATYYCARMVGYGSGWYAYFDYWGQGTLVTVSSGGGGSGGGGSGGGGSDIVMTQTPLSLSVTPGQPASI |
| | | molecule | SCRSSQSLLHSNGYNYLYWYLQKPGQPPQLLIYEVSNRFSGVPDRFSGSGSGTDFTLKISRVEAEDVGVYYCMQALQTPL |
| | | | TFGGGTKVEIKSGGGGSEVQLVESGGGLVQPGGSLKLSCAASGFTFNKYAMNWVRQAPGKGLEWVARIRSKYNNYATYYA |
| | | | DSVKDRFTISRDDSKNTAYLQMNNLKTEDTAVYYCVRHGNFGNSYISYWAYWGQGTLVTVSSGGGGSGGGGSGGGGSQTV |
| | | | VTQEPSLTVSPGGTVTLTCGSSTGAVTSGNYPNWVQQKPGQAPRGLIGGTKFLAPGTPARFSGSLLGGKAALTLSGVQPE |
| | | | DEAEYYCVLWYSNRWVFGGGTKLTVL |
| 751 | FL_61 | VH CDR1 | SYGMH |
| 752 | FL_61 | VH CDR2 | VISYDGSNEFYADSVKG |
| 753 | FL_61 | VH CDR3 | GGEITMVRGVIGYYYYGMDV |
| 754 | FL_61 | VL CDR1 | RASQSISSYLN |
| 755 | FL_61 | VL CDR2 | AASSLQS |
| 756 | FL_61 | VL CDR3 | LQHNSYPLT |
| 757 | FL_61 | VH | QVQLVESGGGVVQPGRSLRLSCAASGFTFSSYGMHWVRQAPGKGLEWVAVISYDGSNEFYADSVKGRFTISRDNSKNTLY |
| | | | LQMNSLRAEDTAVYYCARGGEITMVRGVIGYYYYGMDVWGQGTTVTVS S |
| 758 | FL_61 | VL | DIQMTQSPSSLSASVGDRVTITCRASQSISSYLNWYQQKPGKAPKLLIYAASSLQSGVPSRFSGSGSGTEFTLTISSLQP |
| | | | EDFATYYCLQHNSYPLTFGGGTKVEIK |
| 759 | FL_61 | scFv | QVQLVESGGGVVQPGRSLRLSCAASGFTFSSYGMHWVRQAPGKGLEWVAVISYDGSNEFYADSVKGRFTISRDNSKNTLY |
| | | | LQMNSLRAEDTAVYYCARGGEITMVRGVIGYYYYGMDVWGQGTTVTVSSGGGGSGGGGSGGGGSDIQMTQSPSSLSASVG |
| | | | DRVTITCRASQSISSYLNWYQQKPGKAPKLLIYAASSLQSGVPSRFSGSGSGTEFTLTISSLQPEDFATYYCLQHNSYPL |
| | | | TFGGGTKVEIK |
| 760 | FL_61 | bi- | QVQLVESGGGVVQPGRSLRLSCAASGFTFSSYGMHWVRQAPGKGLEWVAVISYDGSNEFYADSVKGRFTISRDNSKNTLY |
| | | specific | LQMNSLRAEDTAVYYCARGGEITMVRGVIGYYYYGMDVWGQGTTVTVSSGGGGSGGGGSGGGGSDIQMTQSPSSLSASVG |
| | | molecule | DRVTITCRASQSISSYLNWYQQKPGKAPKLLIYAASSLQSGVPSRFSGSGSGTEFTLTISSLQPEDFATYYCLQHNSYPL |
| | | | TFGGGTKVEIKSGGGGSEVQLVESGGGLVQPGGSLKLSCAASGFTFNKYAMNWVRQAPGKGLEWVARIRSKYNNYATYYA |
| | | | DSVKDRFTISRDDSKNTAYLQMNNLKTEDTAVYYCVRHGNFGNSYISYWAYWGQGTLVTVSSGGGGSGGGGSGGGGSQTV |
| | | | VTQEPSLTVSPGGTVTLTCGSSTGAVTSGNYPNWVQQKPGQAPRGLIGGTKFLAPGTPARFSGSLLGGKAALTLSGVQPE |
| | | | DEAEYYCVLWYSNRWVFGGGTKLTVL |
| 761 | FL_62 | VH CDR1 | SYGMH |
| 762 | FL_62 | VH CDR2 | VISYDGSNEFYADSVKG |
| 763 | FL_62 | VH CDR3 | GGEITMVRGVIGYYYYGMDV |
| 764 | FL_62 | VL CDR1 | RASQGVRNNLV |
| 765 | FL_62 | VL CDR2 | GASTRAT |
| 766 | FL_62 | VL CDR3 | LQHNSYPLT |
| 767 | FL_62 | VH | QVQLVESGGGVVQPGRSLRLSCAASGFTFSSYGMHWVRQAPGKGLEWVAVISYDGSNEFYADSVKGRFTISRDNSKNTLY |
| | | | LQMNSLRAEDTAVYYCARGGEITMVRGVIGYYYYGMDVWGQGTTVTVSS |
| 768 | FL_62 | VL | EIVMTQSPATLSVSPGERATLSCRASQGVRNNLVWYQQKPGQAPRLLIYGASTRATGIPARFSGSGSGTEFTLTISSLQS |
| | | | EDFATYYCLQHNSYPLTFGGGTKVEIK |
| 769 | FL_62 | scFv | QVQLVESGGGVVQPGRSLRLSCAASGFTFSSYGMHWVRQAPGKGLEWVAVISYDGSNEFYADSVKGRFTISRDNSKNTLY |
| | | | LQMNSLRAEDTAVYYCARGGEITMVRGVIGYYYYGMDVWGQGTTVTVSSGGGGSGGGGSGGGGSEIVMTQSPATLSVSPG |
| | | | ERATLSCRASQGVRNNLVWYQQKPGQAPRLLIYGASTRATGIPARFSGSGSGTEFTLTISSLQSEDFATYYCLQHNSYPL |
| | | | TFGGGTKVEIK |
| 770 | FL_62 | bi- | QVQLVESGGGVVQPGRSLRLSCAASGFTFSSYGMHWVRQAPGKGLEWVAVISYDGSNEFYADSVKGRFTISRDNSKNTLY |
| | | specific | LQMNSLRAEDTAVYYCARGGEITMVRGVIGYYYYGMDVWGQGTTVTVSSGGGGSGGGGSGGGGSEIVMTQSPATLSVSPG |
| | | molecule | ERATLSCRASQGVRNNLVWYQQKPGQAPRLLIYGASTRATGIPARFSGSGSGTEFTLTISSLQSEDFATYYCLQHNSYPL |
| | | | TFGGGTKVEIKSGGGGSEVQLVESGGGLVQPGGSLKLSCAASGFTFNKYAMNWVRQAPGKGLEWVARIRSKYNNYATYYA |
| | | | DSVKDRFTISRDDSKNTAYLQMNNLKTEDTAVYYCVRHGNFGNSYISYWAYWGQGTLVTVSSGGGGSGGGGSGGGGSQTV |
| | | | VTQEPSLTVSPGGTVTLTCGSSTGAVTSGNYPNWVQQKPGQAPRGLIGGTKFLAPGTPARFSGSLLGGKAALTLSGVQPE |
| | | | DEAEYYCVLWYSNRWVFGGGTKLTVL |
| 771 | FL_63 | VH CDR1 | SYGMH |
| 772 | FL_63 | VH CDR2 | VISYDGSNEFYADSVKG |
| 773 | FL_63 | VH CDR3 | GGEITMVRGVIGYYYYGMDV |
| 774 | FL_63 | VL CDR1 | RTSQSISSYLN |
| 775 | FL_63 | VL CDR2 | AASSLQS |
| 776 | FL_63 | VL CDR3 | LQHNSYPLT |
| 777 | FL_63 | VH | QVQLVESGGGVVQPGRSLRLSCAASGFTFSSYGMHWVRQAPGKGLEWVAVISYDGSNEFYADSVKGRFTISRDNSKNTLY |
| | | | LQMNSLRAEDTAVYYCARGGEITMVRGVIGYYYYGMDVWGQGTTVTVSS |
| 778 | FL_63 | VL | DIQMTQSPSSLSASVGDRVTITCRTSQSISSYLNWYQQKPGKAPKLLIYAASSLQSGVPSRFSGSGSGTEFTLTISSLQP |
| | | | EDFATYYCLQHNSYPLTFGGGTKVDIK |
| 779 | FL_63 | scFv | QVQLVESGGGVVQPGRSLRLSCAASGFTFSSYGMHWVRQAPGKGLEWVAVISYDGSNEFYADSVKGRFTISRDNSKNTLY |
| | | | LQMNSLRAEDTAVYYCARGGEITMVRGVIGYYYYGMDVWGQGTTVTVSSGGGGSGGGGSGGGGSDIQMTQSPSSLSASVG |
| | | | DRVTITCRTSQSISSYLNWYQQKPGKAPKLLIYAASSLQSGVPSRFSGSGSGTEFTLTISSLQPEDFATYYCLQHNSYPL |
| | | | TFGGGTKVDIK |
| 780 | FL_63 | bi- | QVQLVESGGGVVQPGRSLRLSCAASGFTFSSYGMHWVRQAPGKGLEWVAVISYDGSNEFYADSVKGRFTISRDNSKNTLY |
| | | specific | LQMNSLRAEDTAVYYCARGGEITMVRGVIGYYYYGMDVWGQGTTVTVSSGGGGSGGGGSGGGGSDIQMTQSPSSLSASVG |
| | | molecule | DRVTITCRTSQSISSYLNWYQQKPGKAPKLLIYAASSLQSGVPSRFSGSGSGTEFTLTISSLQPEDFATYYCLQHNSYPL |
| | | | TFGGGTKVDIKSGGGGSEVQLVESGGGLVQPGGSLKLSCAASGFTFNKYAMNWVRQAPGKGLEWVARIRSKYNNYATYYA |
| | | | DSVKDRFTISRDDSKNTAYLQMNNLKTEDTAVYYCVRHGNFGNSYISYWAYWGQGTLVTVSSGGGGSGGGGSGGGGSQTV |
| | | | VTQEPSLTVSPGGTVTLTCGSSTGAVTSGNYPNWVQQKPGQAPRGLIGGTKFLAPGTPARFSGSLLGGKAALTLSGVQPE |
| | | | DEAEYYCVLWYSNRWVFGGGTKLTVL |
| 781 | FL_64 | VH CDR1 | SYGMH |
| 782 | FL_64 | VH CDR2 | VISYDGSNEFYADSVKG |
| 783 | FL_64 | VH CDR3 | GGEITMVRGVIGYYYYGMDV |
| 784 | FL_64 | VL CDR1 | RASQSISSYLN |
| 785 | FL_64 | VL CDR2 | AASSLQS |
| 786 | FL_64 | VL CDR3 | LQHNSYPLT |
| 787 | FL_64 | VH | QVQLVESGGGVVQPGRSLRLSCAASGFTFSSYGMHWVRQAPGKGLEWVAVISYDGSNEFYADSVKGRFTISRDNSKNTLY |
| | | | LQMNSLRAEDTAVYYCARGGEITMVRGVIGYYYYGMDVWGQGTTVTVSS |
| 788 | FL_64 | VL | DIQMTQSPSSLSASVGNRVTITCRASQSISSYLNWYQQKPGKAPKLLIYAASSLQSGVPSRFSGSGSGTEFTLTISSLQP |
| | | | EDFATYYCLQHNSYPLTFGGGTKVDIK |
| 789 | FL_64 | scFv | QVQLVESGGGVVQPGRSLRLSCAASGFTFSSYGMHWVRQAPGKGLEWVAVISYDGSNEFYADSVKGRFTISRDNSKNTLY |
| | | | LQMNSLRAEDTAVYYCARGGEITMVRGVIGYYYYGMDVWGQGTTVTVSSGGGGSGGGGSGGGGSDIQMTQSPSSLSASVG |
| | | | NRVTITCRASQSISSYLNWYQQKPGKAPKLLIYAASSLQSGVPSRFSGSGSGTEFTLTISSLQPEDFATYYCLQHNSYPL |
| | | | TFGGGTKVDIK |
| 790 | FL_64 | bi- | QVQLVESGGGVVQPGRSLRLSCAASGFTFSSYGMHWVRQAPGKGLEWVAVISYDGSNEFYADSVKGRFTISRDNSKNTLY |
| | | specific | LQMNSLRAEDTAVYYCARGGEITMVRGVIGYYYYGMDVWGQGTTVTVSSGGGGSGGGGSGGGGSDIQMTQSPSSLSASVG |
| | | molecule | NRVTITCRASQSISSYLNWYQQKPGKAPKLLIYAASSLQSGVPSRFSGSGSGTEFTLTISSLQPEDFATYYCLQHNSYPL |
| | | | TFGGGTKVDIKSGGGGSEVQLVESGGGLVQPGGSLKLSCAASGFTFNKYAMNWVRQAPGKGLEWVARIRSKYNNYATYYA |
| | | | DSVKDRFTISRDDSKNTAYLQMNNLKTEDTAVYYCVRHGNFGNSYISYWAYWGQGTLVTVSSGGGGSGGGGSGGGGSQTV |
| | | | VTQEPSLTVSPGGTVTLTCGSSTGAVTSGNYPNWVQQKPGQAPRGLIGGTKFLAPGTPARFSGSLLGGKAALTLSGVQPE |
| | | | DEAEYYCVLWYSNRWVFGGGTKLTVL |
| 791 | FL_65 | VH CDR1 | SYGMH |
| 792 | FL_65 | VH CDR2 | VISYDGSNKYYADSVKG |
| 793 | FL_65 | VH CDR3 | SYGMDV |
| 794 | FL_65 | VL CDR1 | RASQGISSWLA |
| 795 | FL_65 | VL CDR2 | AASSLQS |
| 796 | FL_65 | VL CDR3 | QQANSFPWT |
| 797 | FL_65 | VH | QVQLVESGGGVVQPGRSLRLSCAASGFTFSSYGMHWVRQAPGKGLEWVAVISYDGSNKYYADSVKGRFTISRDNSKNTLY |
| | | | LQMNSLRAEDTAVYYCARSYGMDVWGQGTTVTVSS |
| 798 | FL_65 | VL | DIQMTQSPSSVSASVGDRVTITCRASQGISSWLAWYQQKPGKAPKLLIYAASSLQSGVPSRFSGSGSGTDFTLTISSLQP |
| | | | EDFATYYCQQANSFPWTFGQGTKLEIK |
| 799 | FL_65 | scFv | QVQLVESGGGVVQPGRSLRLSCAASGFTFSSYGMHWVRQAPGKGLEWVAVISYDGSNKYYADSVKGRFTISRDNSKNTLY |
| | | | LQMNSLRAEDTAVYYCARSYGMDVWGQGTTVTVSSGGGGSGGGGSGGGGSDIQMTQSPSSVSASVGDRVTITCRASQGIS |
| | | | SWLAWYQQKPGKAPKLLIYAASSLQSGVPSRFSGSGSGTDFTLTISSLQPEDFATYYCQQANSFPWTFGQGTKLEIK |
| 800 | FL_65 | bi- | QVQLVESGGGVVQPGRSLRLSCAASGFTFSSYGMHWVRQAPGKGLEWVAVISYDGSNKYYADSVKGRFTISRDNSKNTLY |
| | | specific | LQMNSLRAEDTAVYYCARSYGMDVWGQGTTVTVSSGGGGSGGGGSGGGGSDIQMTQSPSSVSASVGDRVTITCRASQGIS |
| | | molecule | SWLAWYQQKPGKAPKLLIYAASSLQSGVPSRFSGSGSGTDFTLTISSLQPEDFATYYCQQANSFPWTFGQGTKLEIKSGG |
| | | | GGSEVQLVESGGGLVQPGGSLKLSCAASGETENKYAMNWVRQAPGKGLEWVARIRSKYNNYATYYADSVKDRFTISRDDS |
| | | | KNTAYLQMNNLKTEDTAVYYCVRHGNFGNSYISYWAYWGQGTLVTVSSGGGGSGGGGSGGGGSQTVVTQEPSLTVSPGGT |
| | | | VTLTCGSSTGAVTSGNYPNWVQQKPGQAPRGLIGGTKFLAPGTPARFSGSLLGGKAALTLSGVQPEDEAEYYCVLWYSNR |
| | | | WVFGGGTKLTVL |
| 801 | Human | human | MPALARDGGQLPLLVVESAMIEGTITNQDLPVIKCVLINHKNNDSSVGKSSSYPMVSESPEDLGCALRPQSSGTVYEAAA |
| | FLT3 v1 | | VEVDVSASITLQVLVDAPGNISCLWVFKHSSLNCQPHFDLQNRGVVSMVILKMTETQAGEYLLFIQSEATNYTILFTVSI |
| | NM_004119 | | RNTLLYTLRRPYFRKMENQDALVCISESVPEPIVEWVLCDSQGESCKEESPAVVKKEEKVLHELFGTDIRCCARNELGRE |
| | | | CTRLFTIDLNQTPQTTLPQLFLKVGEPLWIRCKAVHVNHGEGLTWELENKALEEGNYFEMSTYSTNRTMIRILFAFVSSV |
| | | | ARNDTGYYTCSSSKHPSQSALVTIVEKGFINATNSSEDYEIDQYEEFCFSVRFKAYPQIRCTWTFSRKSFPCEQKGLDNG |
| | | | YSISKFCNHKHQPGEYIFHAENDDAQFTKMFTLNIRRKPQVLAEASASQASCFSDGYPLPSWTWKKCSDKSPNCTEEITE |
| | | | GVWNRKANRKVFGQWVSSSTLNMSEAIKGFLVKCCAYNSLGTSCETILLNSPGPFPFIQDNISFYATIGVCLLFIVVLTL |
| | | | LICHKYKKQFRYESQLQMVQVTGSSDNEYFYVDFREYEYDLKWEEPRENLEFGKVLGSGAFGKVMNATAYGISKTGVSIQ |
| | | | VAVKMLKEKADSSEREALMSELKMMTQLGSHENIVNLLGACTLSGPIYLIFEYCCYGDLLNYLRSKREKEHRTWTEIFKE |
| | | | HNFSFYPTFQSHPNSSMPGSREVQIHPDSDQISGLHGNSFHSEDEIEYENQKRLEEEEDLNVLTFEDLLCFAYQVAKGME |
| | | | FLEFKSCVHRDLAARNVLVTHGKVVKICDFGLARDIMSDSNYVVRGNARLPVKWMAPESLFEGIYTIKSDVWSYGILLWE |
| | | | IFSLGVNPYPGIPVDANFYKLIQNGFKMDQPFYATEEIYIIMQSCWAFDSRKRPSFPNLTSFLGCQLADAEEAMYQNVDG |
| | | | RVSECPHTYQNRRPFSREMDLGLLSPQAQVEDS |
| 802 | Cyno | macaque | MPALARGGGRLPLLVVFSAMIFGTITNQDLPVIKCVLINHKNNDSSVGKSSSYPMVSESPEDLGCALRPQSAGTVYEAAT |
| | FLT3 x1 | | VEVDVSASITLQVLVDTPGNISCLWVEKHSSLNCQPHEDVQNRGVVSMVILKMTETQAGEYLLFIQSEATNYTILFTVSI |
| | XM_ | | RNTLLFTLRRPYFRKMENQDALVCISESVPEPIVEWVLCDSQGESCKEESPAVVKKEEKVLHELFGTDIRCCARNELGRE |
| | 005585544 | | CTRLFTIDLNQTPQTTLPQLFLKVGEPLWIRCKAVHVNHGEGLTWELENKALEEGSYFEMSTYSTNRTMIRILFAFVSSV |
| | | | ARNDTGYYTCSSSKHPSQSALVTIVEKGFINATNSSEDYEIDQYEEFCFSVRFKAYPQIRCTWTFSRKSFPCEQKGLDDG |
| | | | YSVSKFCNHKHQPGEYIFHAENGDAQFTKMFTLNIRRKPQVLAEASASQASCSSDGYPLPSWTWKKCSDKSPNCTEDIPE |
| | | | GVWNRKANRKVFGQWVSSSTLNMSEAMKGFLVKCCAYNSLGTSCETILLNSPGPFPFIQDSISFYATIGVCLLFIVVLTM |
| | | | LICHKYKKQFRYESQLQMVQVTGSSDNEYFYVDERDCDYDLKWEEPRENLEFGKVLGSGAFGKVMNATAYGISKTGVSIQ |
| | | | VAVKMLKEKADSSEREALMSELKMMTQLGSHENIVNLLGACTLSGPIYLIFEYCCYGDLLNYLRSKREKEHRTWTEIFKE |
| | | | HNFSFYPTFQSHPNSSMPGSRDVQIHPHSDPISGLHGNSFHSEDEIEYENQKRLEEEEDLNVLTFEDLLCFAYQVAKGME |
| | | | FLEFKSCVHRDLAARNVLVTHGKVVKICDFGLARDIMSDSNYVVRGNARLPVKWMAPESLFEGIYTIKSDVWSYGILLWE |
| | | | IFSLGVNPYPGIPVDANFYKLIRNGFKMDQPFYATEEIYIIMQSCWAFDSRKRPSFPHLTSFLGCQLEDAEEAMYQNVDG |
| | | | RVSERPHIYQNRRPFSREMDSGPLSPKAQVEDS |
| 803 | Human | human | MPALARDGGQLPLLVVESAMIEGTITNQDLPVIKCVLINHKNNDSSVGKSSSYPMVSESPEDLGCALRPQSSGTVYEAAA |
| | FLT3 | | VEVDVSASITLQVLVDAPGNISCLWVFKHSSLNCQPHFDLQNRGVVSMVILKMTETQAGEYLLFIQSEATNYTILFTVSI |
| | (T227M) | | RNTLLYTLRRPYFRKMENQDALVCISESVPEPIVEWVLCDSQGESCKEESPAVVKKEEKVLHELFGMDIRCCARNELGRE |
| | isoform | | CTRLFTIDLNQTPQTTLPQLFLKVGEPLWIRCKAVHVNHGEGLTWELENKALEEGNYFEMSTYSTNRTMIRILFAFVSSV |
| | | | ARNDTGYYTCSSSKHPSQSALVTIVEKGFINATNSSEDYEIDQYEEFCFSVRFKAYPQIRCTWTFSRKSFPCEQKGLDNG |
| | | | YSISKFCNHKHQPGEYIFHAENDDAQFTKMFTLNIRRKPQVLAEASASQASCFSDGYPLPSWTWKKCSDKSPNCTEEITE |
| | | | GVWNRKANRKVFGQWVSSSTLNMSEAIKGFLVKCCAYNSLGTSCETILLNSPGPFPFIQDNISFYATIGVCLLFIVVLTL |
| | | | LICHKYKKQFRYESQLQMVQVTGSSDNEYFYVDFREYEYDLKWEEPRENLEFGKVLGSGAFGKVMNATAYGISKTGVSIQ |
| | | | VAVKMLKEKADSSEREALMSELKMMTQLGSHENIVNLLGACTLSGPIYLIFEYCCYGDLLNYLRSKREKEHRTWTEIFKE |
| | | | HNFSFYPTFQSHPNSSMPGSREVQIHPDSDQISGLHGNSFHSEDEIEYENQKRLEEEEDLNVLTFEDLLCFAYQVAKGME |
| | | | FLEFKSCVHRDLAARNVLVTHGKVVKICDFGLARDIMSDSNYVVRGNARLPVKWMAPESLFEGIYTIKSDVWSYGILLWE |
| | | | IFSLGVNPYPGIPVDANFYKLIQNGFKMDQPFYATEEIYIIMQSCWAFDSRKRPSFPNLTSFLGCQLADAEEAMYQNVDG |
| | | | RVSECPHTYQNRRPFSREMDLGLLSPQAQVEDS |
| 804 | Human | human | MPALARDGGQLPLLVVESAMIEGTITNQDLPVIKCVLINHKNNDSSVGKSSSYPMVSESPEDLGCALRPQSSGTVYEAAA |
| | FLT3- | | VEVDVSASITLQVLVDAPGNISCLWVFKHSSLNCQPHFDLQNRGVVSMVILKMTETQAGEYLLFIQSEATNYTILFTVSI |
| | ITD | | RNTLLYTLRRPYFRKMENQDALVCISESVPEPIVEWVLCDSQGESCKEESPAVVKKEEKVLHELFGTDIRCCARNELGRE |
| | isoform | | CTRLFTIDLNQTPQTTLPQLFLKVGEPLWIRCKAVHVNHGEGLTWELENKALEEGNYFEMSTYSTNRTMIRILFAFVSSV |
| | | | ARNDTGYYTCSSSKHPSQSALVTIVEKGFINATNSSEDYEIDQYEEFCFSVRFKAYPQIRCTWTFSRKSFPCEQKGLDNG |
| | | | YSISKFCNHKHQPGEYIFHAENDDAQFTKMFTLNIRRKPQVLAEASASQASCFSDGYPLPSWTWKKCSDKSPNCTEEITE |
| | | | GVWNRKANRKVFGQWVSSSTLNMSEAIKGFLVKCCAYNSLGTSCETILLNSPGPFPFIQDNISFYATIGVCLLFIVVLTL |
| | | | LICHKYKKQFRYESQLQMVQVTGSSDNEYFYVDFREYEYSSSDNEYFYVDFREYEYDLKDLKWEEPRENLEFGKVLGSGA |
| | | | FGKVMNATAYGISKTGVSIQVAVKMLKEKADSSEREALMSELKMMTQLGSHENIVNLLGACTLSGPIYLIFEYCCYGDLL |
| | | | NYLRSKREKFHRTWTEIFKEHNFSFYPTFQSHPNSSMPGSREVQIHPDSDQISGLHGNSFHSEDEIEYENQKRLEEEEDL |
| | | | NVLTFEDLLCFAYQVAKGMEFLEFKSCVHRDLAARNVLVTHGKVVKICDFGLARDIMSDSNYVVRGNARLPVKWMAPESL |
| | | | FEGIYTIKSDVWSYGILLWEIFSLGVNPYPGIPVDANFYKLIQNGFKMDQPFYATEEIYIIMQSCWAFDSRKRPSFPNLT |
| | | | SFLGCQLADAEEAMYQNVDGRVSECPHTYQNRRPFSREMDLGLLSPQAQVEDS |
| 805 | Human | human | MRGARGAWDFLCVLLLLLRVQTGSSQPSVSPGEPSPPSIHPGKSDLIVRVGDEIRLLCTDPGFVKWTFEILDETNENKQN |
| | KIT v1 | | EWITEKAEATNTGKYTCTNKHGLSNSIYVEVRDPAKLELVDRSLYGKEDNDTLVRCPLTDPEVTNYSLKGCQGKPLPKDL |
| | paralogue | | RFIPDPKAGIMIKSVKRAYHRLCLHCSVDQEGKSVLSEKFILKVRPAFKAVPVVSVSKASYLLREGEEFTVTCTIKDVSS |
| | | | SVYSTWKRENSQTKLQEKYNSWHHGDFNYERQATLTISSARVNDSGVFMCYANNTEGSANVTTTLEVVDKGFINIFPMIN |
| | | | TTVFVNDGENVDLIVEYEAFPKPEHQQWIYMNRTFTDKWEDYPKSENESNIRYVSELHLTRLKGTEGGTYTELVSNSDVN |
| | | | AAIAFNVYVNTKPEILTYDRLVNGMLQCVAAGFPEPTIDWYFCPGTEQRCSASVLPVDVQTLNSSGPPFGKLVVQSSIDS |
| | | | SAFKHNGTVECKAYNDVGKTSAYFNFAFKGNNKEQIHPHTLFTPLLIGFVIVAGMMCIIVMILTYKYLQKPMYEVQWKVV |
| | | | EEINGNNYVYIDPTQLPYDHKWEFPRNRLSFGKTLGAGAFGKVVEATAYGLIKSDAAMTVAVKMLKPSAHLTEREALMSE |
| | | | LKVLSYLGNHMNIVNLLGACTIGGPTLVITEYCCYGDLLNFLRRKRDSFICSKQEDHAEAALYKNLLHSKESSCSDSTNE |
| | | | YMDMKPGVSYVVPTKADKRRSVRIGSYIERDVTPAIMEDDELALDLEDLLSFSYQVAKGMAFLASKNCIHRDLAARNILL |
| | | | THGRITKICDFGLARDIKNDSNYVVKGNARLPVKWMAPESIFNCVYTFESDVWSYGIFLWELFSLGSSPYPGMPVDSKFY |
| | | | KMIKEGFRMLSPEHAPAEMYDIMKTCWDADPLKRPTFKQIVQLIEKQISESTNHIYSNLANCSPNRQKPVVDHSVRINSV |
| | | | GSTASSSQPLLVHDDV |
| 806 | Human | human | MGPGVLLLLLVATAWHGQGIPVIEPSVPELVVKPGATVTLRCVGNGSVEWDGPPSPHWTLYSDGSSSILSTNNATFQNTG |
| | CSF1R v1 | | TYRCTEPGDPLGGSAAIHLYVKDPARPWNVLAQEVVVFEDQDALLPCLLTDPVLEAGVSLVRVRGRPLMRHTNYSFSPWH |
| | paralogue | | GFTIHRAKFIQSQDYQCSALMGGRKVMSISIRLKVQKVIPGPPALTLVPAELVRIRGEAAQIVCSASSVDVNEDVFLQHN |
| | NM_005211 | | NTKLAIPQQSDFHNNRYQKVLTLNLDQVDFQHAGNYSCVASNVQGKHSTSMFFRVVESAYLNLSSEQNLIQEVTVGEGLN |
| | | | LKVMVEAYPGLQGFNWTYLGPFSDHQPEPKLANATTKDTYRHTFTLSLPRLKPSEAGRYSFLARNPGGWRALTEELTLRY |
| | | | PPEVSVIWTFINGSGTLLCAASGYPQPNVTWLQCSGHTDRCDEAQVLQVWDDPYPEVLSQEPFHKVTVQSLLTVETLEHN |
| | | | QTYECRAHNSVGSGSWAFIPISAGAHTHPPDEFLFTPVVVACMSIMALLLLLLLLLLYKYKQKPKYQVRWKIIESYEGNS |
| | | | YTFIDPTQLPYNEKWEEPRNNLQFGKTLGAGAFGKVVEATAFGLGKEDAVLKVAVKMLKSTAHADEKEALMSELKIMSHL |
| | | | GQHENIVNLLGACTHGGPVLVITEYCCYGDLLNFLRRKAEAMLGPSLSPGQDPEGGVDYKNIHLEKKYVRRDSGFSSQGV |
| | | | DTYVEMRPVSTSSNDSFSEQDLDKEDGRPLELRDLLHFSSQVAQGMAFLASKNCIHRDVAARNVLLTNGHVAKIGDFGLA |
| | | | RDIMNDSNYIVKGNARLPVKWMAPESIFDCVYTVQSDVWSYGILLWEIFSLGLNPYPGILVNSKFYKLVKDGYQMAQPAF |
| | | | APKNIYSIMQACWALEPTHRPTFQQICSFLQEQAQEDRRERDYTNLPSSSRSGGSGSSSSELEEESSSEHLTCCEQGDIA |
| | | | QPLLQPNNYQFC |
| 807 | Human | human | MGTSHPAFLVLGCLLTGLSLILCQLSLPSILPNENEKVVQLNSSFSLRCFGESEVSWQYPMSEEESSDVEIRNEENNSGL |
| | PDGFRA | | FVTVLEVSSASAAHTGLYTCYYNHTQTEENELEGRHIYIYVPDPDVAFVPLGMTDYLVIVEDDDSAIIPCRTTDPETPVT |
| | paralogue | | LHNSEGVVPASYDSRQGFNGTFTVGPYICEATVKGKKFQTIPFNVYALKATSELDLEMEALKTVYKSGETIVVTCAVFNN |
| | NM_006206 | | EVVDLQWTYPGEVKGKGITMLEEIKVPSIKLVYTLTVPEATVKDSGDYECAARQATREVKEMKKVTISVHEKGFIEIKPT |
| | | | FSQLEAVNLHEVKHFVVEVRAYPPPRISWLKNNLTLIENLTEITTDVEKIQEIRYRSKLKLIRAKEEDSGHYTIVAQNED |
| | | | AVKSYTFELLTQVPSSILDLVDDHHGSTGGQTVRCTAEGTPLPDIEWMICKDIKKCNNETSWTILANNVSNIITEIHSRD |
| | | | RSTVEGRVTFAKVEETIAVRCLAKNLLGAENRELKLVAPTLRSELTVAAAVLVLLVIVIISLIVLVVIWKQKPRYEIRWR |
| | | | VIESISPDGHEYIYVDPMQLPYDSRWEFPRDGLVLGRVLGSGAFGKVVEGTAYGLSRSQPVMKVAVKMLKPTARSSEKQA |
| | | | LMSELKIMTHLGPHLNIVNLLGACTKSGPIYIITEYCFYGDLVNYLHKNRDSFLSHHPEKPKKELDIFGLNPADESTRSY |
| | | | VILSFENNGDYMDMKQADTTQYVPMLERKEVSKYSDIQRSLYDRPASYKKKSMLDSEVKNLLSDDNSEGLTLLDLLSETY |
| | | | QVARGMEFLASKNCVHRDLAARNVLLAQGKIVKICDFGLARDIMHDSNYVSKGSTFLPVKWMAPESIFDNLYTTLSDVWS |
| | | | YGILLWEIFSLGGTPYPGMMVDSTFYNKIKSGYRMAKPDHATSEVYEIMVKCWNSEPEKRPSFYHLSEIVENLLPGQYKK |
| | | | SYEKIHLDFLKSDHPAVARMRVDSDNAYIGVTYKNEEDKLKDWEGGLDEQRLSADSGYIIPLPDIDPVPEEEDLGKRNRH |
| | | | SSQTSEESAIETGSSSSTFIKREDETIEDIDMMDDIGIDSSDLVEDSFL |
| 808 | Human NTM | human | MGVCGYLFLPWKCLVVVSLRLLFLVPTGVPVRSGDATFPKAMDNVTVRQGESATLRCTIDNRVTRVAWLNRSTILYAGND |
| | v3 | | KWCLDPRVVLLSNTQTQYSIEIQNVDVYDEGPYTCSVQTDNHPKTSRVHLIVQVSPKIVEISSDISINEGNNISLTCIAT |
| | paralogue | | GRPEPTVTWRHISPKAVGFVSEDEYLEIQGITREQSGDYECSASNDVAAPVVRRVKVTVNYPPYISEAKGTGVPVGQKGT |
| | | | LQCEASAVPSAEFQWYKDDKRLIEGKKGVKVENRPFLSKLIFFNVSEHDYGNYTCVASNKLGHTNASIMLFEVKTTALTP |
| | | | WKGPGAVSEVSNGTSRRAGCVWLLPLLVLHLLLKF |
| 809 | Human V5 | artifi- | MGWSCIILFLVATATGVHSGKPIPNPLLGLDSTSGTLRRPYFRKMENQDALVCISESVPEPIVEWVLCDSQGESCKEESP |
| | tagged | cial | AVVKKEEKVLHELFGTDIRCCARNELGRECTRLFTIDLNQTPQTTLPQLFLKVGEPLWIRCKAVHVNHGFGLTWELENKA |
| | FLT3- | | LEEGNYFEMSTYSTNRTMIRILFAFVSSVARNDTGYYTCSSSKHPSQSALVTIVEKGFINATNSSEDYEIDQYEEFCFSV |
| | D2xEpCAM | | RFKAYPQIRCTWTFSRKSFPCEQKGLDNGYSISKFCNHKHQPGEYIFHAENDDAQFTKMFTLNIRRKPQVLAEASASQAS |
| | | | CFSDGYPLPSWTWKKCSDKSPNCTEEITEGVWNRKANRKVFGQWVSSSTLNMSEAIKGELVKCCAYNSLGTSCETILLNS |
| | | | PGPFPFIQDNISSGGGGSGAGVIAVIVVVVIAIVAGIVVLVISRKKRMAKYEKAEIKEMGEMHRELNA |
| 810 | Human V5 | artifi- | MGWSCIILFLVATATGVHSGKPIPNPLLGLDSTSGFTIDLNQTPQTTLPQLFLKVGEPLWIRCKAVHVNHGFGLTWELEN |
| | tagged | cial | KALEEGNYFEMSTYSTNRTMIRILFAFVSSVARNDTGYYTCSSSKHPSQSALVTIVEKGFINATNSSEDYEIDQYEEFCF |
| | FLT3- | | SVRFKAYPQIRCTWTFSRKSFPCEQKGLDNGYSISKFCNHKHQPGEYIFHAENDDAQFTKMFTLNIRRKPQVLAEASASQ |
| | D3xEpCAM | | ASCFSDGYPLPSWTWKKCSDKSPNCTEEITEGVWNRKANRKVFGQWVSSSTLNMSEAIKGFLVKCCAYNSLGTSCETILL |
| | | | NSPGPFPFIQDNISSGGGGSGAGVIAVIVVVVIAIVAGIVVLVISRKKRMAKYEKAEIKEMGEMHRELNA |
| 811 | Human V5 | artifi- | MGWSCIILFLVATATGVHSGKPIPNPLLGLDSTSGGFINATNSSEDYEIDQYEEFCFSVRFKAYPQIRCTWTFSRKSFPC |
| | tagged | cial | EQKGLDNGYSISKFCNHKHQPGEYIFHAENDDAQFTKMFTLNIRRKPQVLAEASASQASCFSDGYPLPSWTWKKCSDKSP |
| | FLT3- | | NCTEEITEGVWNRKANRKVFGQWVSSSTLNMSEAIKGFLVKCCAYNSLGTSCETILLNSPGPFPFIQDNISSGGGGSGAG |
| | D4xEpCAM | | VIAVIVVVVIAIVAGIVVLVISRKKRMAKYEKAEIKEMGEMHRELNA |
| 812 | Human V5 | artifi- | MGWSCIILFLVATATGVHSGKPIPNPLLGLDSTSGIRRKPQVLAEASASQASCFSDGYPLPSWTWKKCSDKSPNCTEEIT |
| | tagged | cial | EGVWNRKANRKVFGQWVSSSTLNMSEAIKGFLVKCCAYNSLGTSCETILLNSPGPFPFIQDNISSGGGGSGAGVIAVIVV |
| | FLT3- | | VVIAIVAGIVVLVISRKKRMAKYEKAEIKEMGEMHRELNA |
| | D5xEpCAM | | |
| 813 | Human | human | MPALARDGGQLPLLVVESAMIFGTITNQDLPVIKCVLINHKNNDSSVGKSSSYPMVSESPEDLGCALRPQSSGTVYEAAA |
| | FLT3- | | VEVDVSASITLQVLVDAPGNISCLWVFKHSSLNCQPHFDLQNRGVVSMVILKMTETQAGEYLLFIQSEATNYTILFTVSI |
| | ECD | | RNTLLYTLRRPYFRKMENQDALVCISESVPEPIVEWVLCDSQGESCKEESPAVVKKEEKVLHELFGTDIRCCARNELGRE |
| | | | CTRLFTIDLNQTPQTTLPQLFLKVGEPLWIRCKAVHVNHGEGLTWELENKALEEGNYFEMSTYSTNRTMIRILFAFVSSV |
| | | | ARNDTGYYTCSSSKHPSQSALVTIVEKGFINATNSSEDYEIDQYEEFCFSVRFKAYPQIRCTWTFSRKSFPCEQKGLDNG |
| | | | YSISKFCNHKHQPGEYIFHAENDDAQFTKMFTLNIRRKPQVLAEASASQASCFSDGYPLPSWTWKKCSDKSPNCTEEITE |
| | | | GVWNRKANRKVFGQWVSSSTLNMSEAIKGFLVKCCAYNSLGTSCETILLNSPGPFPFIQDNIS |
| 814 | Human | human | AAVEVDVSASITLQVLVDAPGNISCLWVFKHSSLNCQPHFDLQNRGVVSMVILKMTETQAGEYLLFIQSEATNYTILFTV |
| | FLT3-D1 | | SIR |
| 815 | Human | human | TLRRPYFRKMENQDALVCISESVPEPIVEWVLCDSQGESCKEESPAVVKKEEKVLHELFGTDIRCCARNELGRECTRL |
| | FLT3-D2 | | |
| 816 | Human | human | FTIDLNQTPQTTLPQLFLKVGEPLWIRCKAVHVNHGFGLTWELENKALEEGNYFEMSTYSTNRTMIRILFAFVSSVARND |
| | FLT3-D3 | | TGYYTCSSSKHPSQSALVTIV |
| 817 | Human | human | GFINATNSSEDYEIDQYEEFCFSVRFKAYPQIRCTWTFSRKSFPCEQKGLDNGYSISKFCNHKHQPGEYIFHAENDDAQF |
| | FLT3-D4 | | TKMFTLN |
| 818 | Human | human | IRRKPQVLAEASASQASCFSDGYPLPSWTWKKCSDKSPNCTEEITEGVWNRKANRKVFGQWVSSSTLNMSEAIKGFLVKC |
| | FLT3-D5 | | CAYNSLGTSCETILLNSPG |
| 819 | hu 1sp | artifi- | NQDLPVIKCVLINHKNNDSSVGKSSSYPMVSESPEDLGCALRPQSSGTVYEA |
| | V5xFlt3 | cial | |
| | E1muxEpC- | | |
| | pEF DHFR | | |
| 820 | hu 1sp | artifi- | AAVEVDVSASITLQVLVDAPGNISCLWVFKHSSLNCQPHFDLQNRGVVSMVILKMTETQAGEYLLFIQSEATNYTILFTV |
| | V5xFlt3 | cial | SIRNTLLYT |
| | E2muxEpC- | | |
| | pEF DHFR | | |
| 821 | hu 1sp | artifi- | LRRPYFRKMENQDALVCISESVPEPIVEWVLCDSQGESCKEESPAVVKKEEKVLHELFGTDIRCCARNELGRECTRL |
| | V5xFlt3 | cial | |
| | E3muxEpC- | | |
| | pEF DHFR | | |
| 822 | hu 1sp | artifi- | LRRPYFRKMENQDALVCISESVPEPIVEWVLCDSQGESC |
| | V5xFlt3 | cial | |
| | E3AmuxEpC- | | |
| | pEF DHFR | | |
| 823 | hu 1sp | artifi- | KEESPAVVKKEEKVLHELFGTDIRCCARNELGRECTRL |
| | V5xFlt3 | cial | |
| | E3BmuxEpC- | | |
| | pEF DHFR | | |
| 824 | hu 1sp | artifi- | FTIDLNQTPQTTLPQLFLKVGEPLWIRCKAVHVNHGFGLTWELENKALEEGNYFEMSTYSTNRTMIRILFAFVSSVARND |
| | V5xFlt3 | cial | TGYYTCSSSKHPSQSALVTIV |
| | E4muxEpC- | | |
| | pEF DHFR | | |
| 825 | hu 1sp | artifi- | EKGFINATNSSEDYEIDQYEEFCFSVRFKAYPQIRCTWTFSRKSFPCEQKGLDNGYSISKFCNHKHQPGEYIFHAENDDA |
| | V5xFlt3 | cial | QFTKMFTLN |
| | E5muxEpC- | | |
| | pEF DHFR | | |
| 826 | hu 1sp | artifi- | IRRKPQVLAEASASQASCFSDGYPLPSWTWKKCSDKSPNCTEEITEGVWNRKANRKVFGQWVSSSTLNMSEAIKGFLVKC |
| | V5xFlt3 | cial | CAYNSLGTSCETILLNSPGPFPFIQDNIS |
| | E6muxEpC- | | |
| | pEF DHFR | | |
| 827 | hu 1sp | artifi- | GKPIPNPLLGLDSTSGNQDLPVIKCVLISHENNGSSAGKPSSYRMVRGSPEDLQCAPRRQSEGTVYEAAAVEVDVSASIT |
| | V5xFlt3- | cial | LQVLVDAPGNISCLWVFKHSSLNCQPHFDLQNRGVVSMVILKMTETQAGEYLLFIQSEATNYTILFTVSIRNTLLYTLRR |
| | E1muxEpC- | | PYFRKMENQDALVCISESVPEPIVEWVLCDSQGESCKEESPAVVKKEEKVLHELFGTDIRCCARNELGRECTRLFTIDLN |
| | pEFDHFR | | QTPQTTLPQLFLKVGEPLWIRCKAVHVNHGEGLTWELENKALEEGNYFEMSTYSTNRTMIRILFAFVSSVARNDTGYYTC |
| | | | SSSKHPSQSALVTIVEKGFINATNSSEDYEIDQYEEFCFSVRFKAYPQIRCTWTFSRKSFPCEQKGLDNGYSISKFCNHK |
| | | | HQPGEYIFHAENDDAQFTKMFTLNIRRKPQVLAEASASQASCFSDGYPLPSWTWKKCSDKSPNCTEEITEGVWNRKANRK |
| | | | VFGQWVSSSTLNMSEAIKGFLVKCCAYNSLGTSCETILLNSPGPFPFIQDNISSGGGGSGAGVIAVIVVVVIAIVAGIVV |
| | | | LVISRKKRMAKYEKAEIKEMGEMHRELNA |
| 828 | hu 1sp | artifi- | GKPIPNPLLGLDSTSGNQDLPVIKCVLINHKNNDSSVGKSSSYPMVSESPEDLGCALRPQSSGTVYEAATVEVAESGSIT |
| | V5xFlt3- | cial | LQVQLATPGDLSCLWVFKHSSLGCQPHFDLQNRGIVSMAILNVTETQAGEYLLHIQSEAANYTVLFTVNVRDTQLYVLRR |
| | E2muxEpC- | | PYFRKMENQDALVCISESVPEPIVEWVLCDSQGESCKEESPAVVKKEEKVLHELFGTDIRCCARNELGRECTRLFTIDLN |
| | pEFDHFR | | QTPQTTLPQLFLKVGEPLWIRCKAVHVNHGEGLTWELENKALEEGNYFEMSTYSTNRTMIRILFAFVSSVARNDTGYYTC |
| | | | SSSKHPSQSALVTIVEKGFINATNSSEDYEIDQYEEFCFSVRFKAYPQIRCTWTFSRKSFPCEQKGLDNGYSISKFCNHK |
| | | | HQPGEYIFHAENDDAQFTKMFTLNIRRKPQVLAEASASQASCFSDGYPLPSWTWKKCSDKSPNCTEEITEGVWNRKANRK |
| | | | VFGQWVSSSTLNMSEAIKGFLVKCCAYNSLGTSCETILLNSPGPFPFIQDNISSGGGGSGAGVIAVIVVVVIAIVAGIVV |
| | | | LVISRKKRMAKYEKAEIKEMGEMHRELNA |
| 829 | hu 1sp | artifi- | MGWSCIILFLVATATGVHSGKPIPNPLLGLDSTSGNQDLPVIKCVLINHKNNDSSVGKSSSYPMVSESPEDLGCALRPQS |
| | V5xFlt3- | cial | SGTVYEAAAVEVDVSASITLQVLVDAPGNISCLWVFKHSSLNCQPHFDLQNRGVVSMVILKMTETQAGEYLLFIQSEATN |
| | E3muxEpC- | | YTILFTVSIRNTLLYTLRRPYFRKMENQDALLCISEGVPEPTVEWVLCSSHRESCKEEGPAVVRKEEKVLHELFGTDIRC |
| | pEFDHFR | | CARNALGRECTKLFTIDLNQTPQTTLPQLFLKVGEPLWIRCKAVHVNHGFGLTWELENKALEEGNYFEMSTYSTNRTMIR |
| | | | ILFAFVSSVARNDTGYYTCSSSKHPSQSALVTIVEKGFINATNSSEDYEIDQYEEFCFSVRFKAYPQIRCTWTFSRKSFP |
| | | | CEQKGLDNGYSISKFCNHKHQPGEYIFHAENDDAQFTKMFTLNIRRKPQVLAEASASQASCFSDGYPLPSWTWKKCSDKS |
| | | | PNCTEEITEGVWNRKANRKVFGQWVSSSTLNMSEAIKGFLVKCCAYNSLGTSCETILLNSPGPFPFIQDNISSGGGGSGA |
| | | | GVIAVIVVVVIAIVAGIVVLVISRKKRMAKYEKAEIKEMGEMHRELNA |
| 830 | hu 1sp | artifi- | GKPIPNPLLGLDSTSGNQDLPVIKCVLINHKNNDSSVGKSSSYPMVSESPEDLGCALRPQSSGTVYEAAAVEVDVSASIT |
| | V5xFlt3- | cial | LQVLVDAPGNISCLWVFKHSSLNCQPHFDLQNRGVVSMVILKMTETQAGEYLLFIQSEATNYTILFTVSIRNTLLYTLRR |
| | E3AmuxEpC- | | PYFRKMENQDALLCISEGVPEPTVEWVLCSSHRESCKEESPAVVKKEEKVLHELFGTDIRCCARNELGRECTRLFTIDLN |
| | pEFDHFR | | QTPQTTLPQLFLKVGEPLWIRCKAVHVNHGEGLTWELENKALEEGNYFEMSTYSTNRTMIRILFAFVSSVARNDTGYYTC |
| | | | SSSKHPSQSALVTIVEKGFINATNSSEDYEIDQYEEFCFSVRFKAYPQIRCTWTFSRKSFPCEQKGLDNGYSISKFCNHK |
| | | | HQPGEYIFHAENDDAQFTKMFTLNIRRKPQVLAEASASQASCFSDGYPLPSWTWKKCSDKSPNCTEEITEGVWNRKANRK |
| | | | VFGQWVSSSTLNMSEAIKGFLVKCCAYNSLGTSCETILLNSPGPFPFIQDNISSGGGGSGAGVIAVIVVVVIAIVAGIVV |
| | | | LVISRKKRMAKYEKAEIKEMGEMHRELNA |
| 831 | hu 1sp | artifi- | GKPIPNPLLGLDSTSGNQDLPVIKCVLINHKNNDSSVGKSSSYPMVSESPEDLGCALRPQSSGTVYEAAAVEVDVSASIT |
| | V5xFlt3- | cial | LQVLVDAPGNISCLWVFKHSSLNCQPHFDLQNRGVVSMVILKMTETQAGEYLLFIQSEATNYTILFTVSIRNTLLYTLRR |
| | E3BmuxEpC- | | PYFRKMENQDALVCISESVPEPIVEWVLCDSQGESCKEEGPAVVRKEEKVLHELFGTDIRCCARNALGRECTKLFTIDLN |
| | pEFDHFR | | QTPQTTLPQLFLKVGEPLWIRCKAVHVNHGEGLTWELENKALEEGNYFEMSTYSTNRTMIRILFAFVSSVARNDTGYYTC |
| | | | SSSKHPSQSALVTIVEKGFINATNSSEDYEIDQYEEFCFSVRFKAYPQIRCTWTFSRKSFPCEQKGLDNGYSISKFCNHK |
| | | | HQPGEYIFHAENDDAQFTKMFTLNIRRKPQVLAEASASQASCFSDGYPLPSWTWKKCSDKSPNCTEEITEGVWNRKANRK |
| | | | VFGQWVSSSTLNMSEAIKGFLVKCCAYNSLGTSCETILLNSPGPFPFIQDNISSGGGGSGAGVIAVIVVVVIAIVAGIVV |
| | | | LVISRKKRMAKYEKAEIKEMGEMHRELNA |
| 832 | hu 1sp | artifi- | GKPIPNPLLGLDSTSGNQDLPVIKCVLINHKNNDSSVGKSSSYPMVSESPEDLGCALRPQSSGTVYEAAAVEVDVSASIT |
| | V5xFlt3- | cial | LQVLVDAPGNISCLWVFKHSSLNCQPHFDLQNRGVVSMVILKMTETQAGEYLLFIQSEATNYTILFTVSIRNTLLYTLRR |
| | E4muxEpC- | | PYFRKMENQDALVCISESVPEPIVEWVLCDSQGESCKEESPAVVKKEEKVLHELFGTDIRCCARNELGRECTRLFTIDLN |
| | pEFDHFR | | QAPQSTLPQLFLKVGEPLWIRCKAIHVNHGFGLTWELEDKALEEGSYFEMSTYSTNRTMIRILLAFVSSVGRNDTGYYTC |
| | | | SSSKHPSQSALVTILEKGFINATNSSEDYEIDQYEEFCFSVRFKAYPQIRCTWTFSRKSFPCEQKGLDNGYSISKFCNHK |
| | | | HQPGEYIFHAENDDAQFTKMFTLNIRRKPQVLAEASASQASCFSDGYPLPSWTWKKCSDKSPNCTEEITEGVWNRKANRK |
| | | | VFGQWVSSSTLNMSEAIKGFLVKCCAYNSLGTSCETILLNSPGPFPFIQDNISSGGGGSGAGVIAVIVVVVIAIVAGIVV |
| | | | LVISRKKRMAKYEKAEIKEMGEMHRELNA |
| 833 | hu 1sp | artifi- | GKPIPNPLLGLDSTSGNQDLPVIKCVLINHKNNDSSVGKSSSYPMVSESPEDLGCALRPQSSGTVYEAAAVEVDVSASIT |
| | V5xFlt3- | cial | LQVLVDAPGNISCLWVFKHSSLNCQPHFDLQNRGVVSMVILKMTETQAGEYLLFIQSEATNYTILFTVSIRNTLLYTLRR |
| | E5muxEpC- | | PYFRKMENQDALVCISESVPEPIVEWVLCDSQGESCKEESPAVVKKEEKVLHELFGTDIRCCARNELGRECTRLFTIDLN |
| | pEFDHFR | | QTPQTTLPQLFLKVGEPLWIRCKAVHVNHGEGLTWELENKALEEGNYFEMSTYSTNRTMIRILFAFVSSVARNDTGYYTC |
| | | | SSSKHPSQSALVTIVEKGFINATSSQEEYEIDPYEKFCFSVRFKAYPRIRCTWIFSQASFPCEQRGLEDGYSISKFCDHK |
| | | | NKPGEYIFYAENDDAQFTKMFTLNIRRKPQVLAEASASQASCFSDGYPLPSWTWKKCSDKSPNCTEEITEGVWNRKANRK |
| | | | VFGQWVSSSTLNMSEAIKGFLVKCCAYNSLGTSCETILLNSPGPFPFIQDNISSGGGGSGAGVIAVIVVVVIAIVAGIVV |
| | | | LVISRKKRMAKYEKAEIKEMGEMHRELNA |
| 834 | hu 1sp | artifi- | GKPIPNPLLGLDSTSGNQDLPVIKCVLINHKNNDSSVGKSSSYPMVSESPEDLGCALRPQSSGTVYEAAAVEVDVSASIT |
| | V5xFlt3- | cial | LQVLVDAPGNISCLWVFKHSSLNCQPHFDLQNRGVVSMVILKMTETQAGEYLLFIQSEATNYTILFTVSIRNTLLYTLRR |
| | E6muxEpC- | | PYFRKMENQDALVCISESVPEPIVEWVLCDSQGESCKEESPAVVKKEEKVLHELFGTDIRCCARNELGRECTRLFTIDLN |
| | pEFDHFR | | QTPQTTLPQLFLKVGEPLWIRCKAVHVNHGEGLTWELENKALEEGNYFEMSTYSTNRTMIRILFAFVSSVARNDTGYYTC |
| | | | SSSKHPSQSALVTIVEKGFINATNSSEDYEIDQYEEFCFSVRFKAYPQIRCTWTFSRKSFPCEQKGLDNGYSISKFCNHK |
| | | | HQPGEYIFHAENDDAQFTKMFTLNIRKKPQVLANASASQASCSSDGYPLPSWTWKKCSDKSPNCTEEIPEGVWNKKANRK |
| | | | VFGQWVSSSTLNMSEAGKGLLVKCCAYNSMGTSCETIFLNSPGPFPFIQDNISSGGGGSGAGVIAVIVVVVIAIVAGIVV |
| | | | LVISRKKRMAKYEKAEIKEMGEMHRELNA |
| 835 | Fc | artifi- | DKTHTCPPCPAPELLGGPSVFLEPPKPKDTLMISRTPEVTCVVVDVSHEDPEVKFNWYVDGVEVHNAKTKPCEEQYGSTY |
| | monomer-1 | cial | RCVSVLTVLHQDWLNGKEYKCKVSNKALPAPIEKTISKAKGQPREPQVYTLPPSREEMTKNQVSLTCLVKGFYPSDIAVE |
| | +c/−g | | WESNGQPENNYKTTPPVLDSDGSFELYSKLTVDKSRWQQGNVESCSVMHEALHNHYTQKSLSLSPGK |
| 836 | Fc | artifi- | DKTHTCPPCPAPELLGGPSVFLEPPKPKDTLMISRTPEVTCVVVDVSHEDPEVKFNWYVDGVEVHNAKTKPCEEQYGSTY |
| | monomer-2 | cial | RCVSVLTVLHQDWLNGKEYKCKVSNKALPAPIEKTISKAKGQPREPQVYTLPPSREEMTKNQVSLTCLVKGFYPSDIAVE |
| | +c/−g/delGK | | WESNGQPENNYKTTPPVLDSDGSFELYSKLTVDKSRWQQGNVESCSVMHEALHNHYTQKSLSLSP |
| 837 | Fc | artifi- | DKTHTCPPCPAPELLGGPSVFLEPPKPKDTLMISRTPEVTCVVVDVSHEDPEVKFNWYVDGVEVHNAKTKPREEQYNSTY |
| | monomer-3 | cial | RVVSVLTVLHQDWLNGKEYKCKVSNKALPAPIEKTISKAKGQPREPQVYTLPPSREEMTKNQVSLTCLVKGFYPSDIAVE |
| | −c/+g | | WESNGQPENNYKTTPPVLDSDGSFFLYSKLTVDKSRWQQGNVFSCSVMHEALHNHYTQKSLSLSPGK |
| 838 | Fc | artifi- | DKTHTCPPCPAPELLGGPSVFLEPPKPKDTLMISRTPEVTCVVVDVSHEDPEVKFNWYVDGVEVHNAKTKPREEQYNSTY |
| | monomer-4 | cial | RVVSVLTVLHQDWLNGKEYKCKVSNKALPAPIEKTISKAKGQPREPQVYTLPPSREEMTKNQVSLTCLVKGFYPSDIAVE |
| | −c/+g/delGK | | WESNGQPENNYKTTPPVLDSDGSFFLYSKLTVDKSRWQQGNVFSCSVMHEALHNHYTQKSLSLSP |
| 839 | Fc | artifi- | DKTHTCPPCPAPELLGGPSVFLEPPKPKDTLMISRTPEVTCVVVDVSHEDPEVKFNWYVDGVEVHNAKTKPREEQYGSTY |
| | monomer-5 | cial | RVVSVLTVLHQDWLNGKEYKCKVSNKALPAPIEKTISKAKGQPREPQVYTLPPSREEMTKNQVSLTCLVKGFYPSDIAVE |
| | −c/−g | | WESNGQPENNYKTTPPVLDSDGSFFLYSKLTVDKSRWQQGNVFSCSVMHEALHNHYTQKSLSLSPGK |
| 840 | Fc | artifi- | DKTHTCPPCPAPELLGGPSVFLEPPKPKDTLMISRTPEVTCVVVDVSHEDPEVKFNWYVDGVEVHNAKTKPREEQYGSTY |
| | monomer-6 | cial | RVVSVLTVLHQDWLNGKEYKCKVSNKALPAPIEKTISKAKGQPREPQVYTLPPSREEMTKNQVSLTCLVKGFYPSDIAVE |
| | −c/−g/delGK | | WESNGQPENNYKTTPPVLDSDGSFFLYSKLTVDKSRWQQGNVFSCSVMHEALHNHYTQKSLSLSP |
| 841 | Fc | artifi- | DKTHTCPPCPAPELLGGPSVFLEPPKPKDTLMISRTPEVTCVVVDVSHEDPEVKFNWYVDGVEVHNAKTKPCEEQYNSTY |
| | monomer-7 | cial | RCVSVLTVLHQDWLNGKEYKCKVSNKALPAPIEKTISKAKGQPREPQVYTLPPSREEMTKNQVSLTCLVKGFYPSDIAVE |
| | +c/+g | | WESNGQPENNYKTTPPVLDSDGSFFLYSKLTVDKSRWQQGNVFSCSVMHEALHNHYTQKSLSLSPGK |
| 842 | Fc | artifi- | DKTHTCPPCPAPELLGGPSVFLEPPKPKDTLMISRTPEVTCVVVDVSHEDPEVKFNWYVDGVEVHNAKTKPCEEQYNSTY |
| | monomer-8 | cial | RCVSVLTVLHQDWLNGKEYKCKVSNKALPAPIEKTISKAKGQPREPQVYTLPPSREEMTKNQVSLTCLVKGFYPSDIAVE |
| | +c/+g/delG | | WESNGQPENNYKTTPPVLDSDGSFFLYSKLTVDKSRWQQGNVFSCSVMHEALHNHYTQKSLSLSP |
| | K | | |
| 843 | scFc-1 | artifi- | DKTHTCPPCPAPELLGGPSVFLEPPKPKDTLMISRTPEVTCVVVDVSHEDPEVKFNWYVDGVEVHNAKTKPCEEQYGSTY |
| | | cial | RCVSVLTVLHQDWLNGKEYKCKVSNKALPAPIEKTISKAKGQPREPQVYTLPPSREEMTKNQVSLTCLVKGFYPSDIAVE |
| | | | WESNGQPENNYKTTPPVLDSDGSFFLYSKLTVDKSRWQQGNVFSCSVMHEALHNHYTQKSLSLSPGKGGGGSGGGGSGGG |
| | | | GSGGGGSGGGGSGGGGSDKTHTCPPCPAPELLGGPSVFLEPPKPKDTLMISRTPEVTCVVVDVSHEDPEVKFNWYVDGVE |
| | | | VHNAKTKPCEEQYGSTYRCVSVLTVLHQDWLNGKEYKCKVSNKALPAPIEKTISKAKGQPREPQVYTLPPSREEMTKNQV |
| | | | SLTCLVKGFYPSDIAVEWESNGQPENNYKTTPPVLDSDGSFELYSKLTVDKSRWQQGNVFSCSVMHEALHNHYTQKSLSL |
| | | | SPGK |
| 844 | scFc-2 | artifi- | DKTHTCPPCPAPELLGGPSVFLEPPKPKDTLMISRTPEVTCVVVDVSHEDPEVKFNWYVDGVEVHNAKTKPCEEQYGSTY |
| | | cial | RCVSVLTVLHQDWLNGKEYKCKVSNKALPAPIEKTISKAKGQPREPQVYTLPPSREEMTKNQVSLTCLVKGFYPSDIAVE |
| | | | WESNGQPENNYKTTPPVLDSDGSFFLYSKLTVDKSRWQQGNVFSCSVMHEALHNHYTQKSLSLSPGGGGSGGGGSGGGGS |
| | | | GGGGSGGGGSGGGGSDKTHTCPPCPAPELLGGPSVFLEPPKPKDTLMISRTPEVTCVVVDVSHEDPEVKFNWYVDGVEVH |
| | | | NAKTKPCEEQYGSTYRCVSVLTVLHQDWLNGKEYKCKVSNKALPAPIEKTISKAKGQPREPQVYTLPPSREEMTKNQVSL |
| | | | TCLVKGFYPSDIAVEWESNGQPENNYKTTPPVLDSDGSFELYSKLTVDKSRWQQGNVFSCSVMHEALHNHYTQKSLSLSP |
| 845 | scFc-3 | artifi- | DKTHTCPPCPAPELLGGPSVFLEPPKPKDTLMISRTPEVTCVVVDVSHEDPEVKFNWYVDGVEVHNAKTKPREEQYNSTY |
| | | cial | RVVSVLTVLHQDWLNGKEYKCKVSNKALPAPIEKTISKAKGQPREPQVYTLPPSREEMTKNQVSLTCLVKGFYPSDIAVE |
| | | | WESNGQPENNYKTTPPVLDSDGSFFLYSKLTVDKSRWQQGNVFSCSVMHEALHNHYTQKSLSLSPGKGGGGSGGGGSGGG |
| | | | GSGGGGSGGGGSGGGGSDKTHTCPPCPAPELLGGPSVFLEPPKPKDTLMISRTPEVTCVVVDVSHEDPEVKFNWYVDGVE |
| | | | VHNAKTKPREEQYNSTYRVVSVLTVLHQDWLNGKEYKCKVSNKALPAPIEKTISKAKGQPREPQVYTLPPSREEMTKNQV |
| | | | SLTCLVKGFYPSDIAVEWESNGQPENNYKTTPPVLDSDGSFELYSKLTVDKSRWQQGNVFSCSVMHEALHNHYTQKSLSL |
| | | | SPGK |
| 846 | scFc-4 | artifi- | DKTHTCPPCPAPELLGGPSVFLEPPKPKDTLMISRTPEVTCVVVDVSHEDPEVKFNWYVDGVEVHNAKTKPREEQYNSTY |
| | | cial | RVVSVLTVLHQDWLNGKEYKCKVSNKALPAPIEKTISKAKGQPREPQVYTLPPSREEMTKNQVSLTCLVKGFYPSDIAVE |
| | | | WESNGQPENNYKTTPPVLDSDGSFFLYSKLTVDKSRWQQGNVFSCSVMHEALHNHYTQKSLSLSPGGGGSGGGGSGGGGS |
| | | | GGGGSGGGGSGGGGSDKTHTCPPCPAPELLGGPSVFLEPPKPKDTLMISRTPEVTCVVVDVSHEDPEVKFNWYVDGVEVH |
| | | | NAKTKPREEQYNSTYRVVSVLTVLHQDWLNGKEYKCKVSNKALPAPIEKTISKAKGQPREPQVYTLPPSREEMTKNQVSL |
| | | | TCLVKGFYPSDIAVEWESNGQPENNYKTTPPVLDSDGSFELYSKLTVDKSRWQQGNVFSCSVMHEALHNHYTQKSLSLSP |
| 847 | scFc-5 | artifi- | DKTHTCPPCPAPELLGGPSVFLEPPKPKDTLMISRTPEVTCVVVDVSHEDPEVKFNWYVDGVEVHNAKTKPREEQYGSTY |
| | | cial | RVVSVLTVLHQDWLNGKEYKCKVSNKALPAPIEKTISKAKGQPREPQVYTLPPSREEMTKNQVSLTCLVKGFYPSDIAVE |
| | | | WESNGQPENNYKTTPPVLDSDGSFFLYSKLTVDKSRWQQGNVFSCSVMHEALHNHYTQKSLSLSPGKGGGGSGGGGSGGG |
| | | | GSGGGGSGGGGSGGGGSDKTHTCPPCPAPELLGGPSVFLEPPKPKDTLMISRTPEVTCVVVDVSHEDPEVKFNWYVDGVE |
| | | | VHNAKTKPREEQYGSTYRVVSVLTVLHQDWLNGKEYKCKVSNKALPAPIEKTISKAKGQPREPQVYTLPPSREEMTKNQV |
| | | | SLTCLVKGFYPSDIAVEWESNGQPENNYKTTPPVLDSDGSFELYSKLTVDKSRWQQGNVFSCSVMHEALHNHYTQKSLSL |
| | | | SPGK |
| 848 | scFc-6 | artifi- | DKTHTCPPCPAPELLGGPSVFLEPPKPKDTLMISRTPEVTCVVVDVSHEDPEVKFNWYVDGVEVHNAKTKPREEQYGSTY |
| | | cial | RVVSVLTVLHQDWLNGKEYKCKVSNKALPAPIEKTISKAKGQPREPQVYTLPPSREEMTKNQVSLTCLVKGFYPSDIAVE |
| | | | WESNGQPENNYKTTPPVLDSDGSFFLYSKLTVDKSRWQQGNVFSCSVMHEALHNHYTQKSLSLSPGGGGSGGGGSGGGGS |
| | | | GGGGSGGGGSGGGGSDKTHTCPPCPAPELLGGPSVFLEPPKPKDTLMISRTPEVTCVVVDVSHEDPEVKFNWYVDGVEVH |
| | | | NAKTKPREEQYGSTYRVVSVLTVLHQDWLNGKEYKCKVSNKALPAPIEKTISKAKGQPREPQVYTLPPSREEMTKNQVSL |
| | | | TCLVKGFYPSDIAVEWESNGQPENNYKTTPPVLDSDGSFELYSKLTVDKSRWQQGNVFSCSVMHEALHNHYTQKSLSLSP |
| 849 | scFc-7 | artifi- | DKTHTCPPCPAPELLGGPSVFLEPPKPKDTLMISRTPEVTCVVVDVSHEDPEVKFNWYVDGVEVHNAKTKPCEEQYNSTY |
| | | cial | RCVSVLTVLHQDWLNGKEYKCKVSNKALPAPIEKTISKAKGQPREPQVYTLPPSREEMTKNQVSLTCLVKGFYPSDIAVE |
| | | | WESNGQPENNYKTTPPVLDSDGSFFLYSKLTVDKSRWQQGNVFSCSVMHEALHNHYTQKSLSLSPGKGGGGSGGGGSGGG |
| | | | GSGGGGSGGGGSGGGGSDKTHTCPPCPAPELLGGPSVFLEPPKPKDTLMISRTPEVTCVVVDVSHEDPEVKFNWYVDGVE |
| | | | VHNAKTKPCEEQYNSTYRCVSVLTVLHQDWLNGKEYKCKVSNKALPAPIEKTISKAKGQPREPQVYTLPPSREEMTKNQV |
| | | | SLTCLVKGFYPSDIAVEWESNGQPENNYKTTPPVLDSDGSFELYSKLTVDKSRWQQGNVFSCSVMHEALHNHYTQKSLSL |
| | | | SPGK |
| 850 | scFc-8 | artifi- | DKTHTCPPCPAPELLGGPSVFLEPPKPKDTLMISRTPEVTCVVVDVSHEDPEVKFNWYVDGVEVHNAKTKPCEEQYNSTY |
| | | cial | RCVSVLTVLHQDWLNGKEYKCKVSNKALPAPIEKTISKAKGQPREPQVYTLPPSREEMTKNQVSLTCLVKGFYPSDIAVE |
| | | | WESNGQPENNYKTTPPVLDSDGSFFLYSKLTVDKSRWQQGNVFSCSVMHEALHNHYTQKSLSLSPGGGGSGGGGSGGGGS |
| | | | GGGGSGGGGSGGGGSDKTHTCPPCPAPELLGGPSVFLEPPKPKDTLMISRTPEVTCVVVDVSHEDPEVKFNWYVDGVEVH |
| | | | NAKTKPCEEQYNSTYRCVSVLTVLHQDWLNGKEYKCKVSNKALPAPIEKTISKAKGQPREPQVYTLPPSREEMTKNQVSL |
| | | | TCLVKGFYPSDIAVEWESNGQPENNYKTTPPVLDSDGSFELYSKLTVDKSRWQQGNVFSCSVMHEALHNHYTQKSLSLSP |
| 851 | Peptide | (G₄S)₄ | GGGGSGGGGSGGGGSGGGGS |
| | linker | linker | |
| 852 | Peptide | (G₄S)₅ | GGGGSGGGGSGGGGSGGGGSGGGGS |
| | linker | linker | |
| 853 | Peptide | (G₄S)₆ | GGGGSGGGGSGGGGSGGGGSGGGGSGGGGS |
| | linker | linker | |
| 854 | Peptide | (G₄S)₇ | GGGGSGGGGSGGGGSGGGGSGGGGSGGGGSGGGGS |
| | linker | linker | |
| 855 | Peptide | (G₄S)₈ | GGGGSGGGGSGGGGSGGGGSGGGGSGGGGSGGGGSGGGGS |
| | linker | linker | |
| 856 | FL_16xCD | Bi- | QVTLKESGPVLVKPTETLTLTCTVSGFSLRNARMAVSWIRQPPGKTLEWLAHIFSNDEKSYSTSLKSRLTISKDTSKSQV |
| | 3-scFc | specific | VLTMTNMDPVDTATYYCARIVGYGSGWYGYFDYWGQGTLVTVSSGGGGSGGGGSGGGGSDIQMTQSPSSVSASVGDRVTI |
| | | HLE | TCRASQDIRYDLAWYQQKPGKAPKRLIYAASSLQSGVPSRFSGSGSGTEFTLTISSLQPEDFATYYCLQHNEYPLTEGGG |
| | | molecule | TKVEIKSGGGGSEVQLVESGGGLVQPGGSLKLSCAASGETENKYAMNWVRQAPGKGLEWVARIRSKYNNYATYYADSVKD |
| | | | RFTISRDDSKNTAYLQMNNLKTEDTAVYYCVRHGNFGNSYISYWAYWGQGTLVTVSSGGGGSGGGGSGGGGSQTVVTQEP |
| | | | SLTVSPGGTVTLTCGSSTGAVTSGNYPNWVQQKPGQAPRGLIGGTKFLAPGTPARFSGSLLGGKAALTLSGVQPEDEAEY |
| | | | YCVLWYSNRWVFGGGTKLTVLGGGGDKTHTCPPCPAPELLGGPSVFLEPPKPKDTLMISRTPEVTCVVVDVSHEDPEVKF |
| | | | NWYVDGVEVHNAKTKPCEEQYGSTYRCVSVLTVLHQDWLNGKEYKCKVSNKALPAPIEKTISKAKGQPREPQVYTLPPSR |
| | | | EEMTKNQVSLTCLVKGFYPSDIAVEWESNGQPENNYKTTPPVLDSDGSFFLYSKLTVDKSRWQQGNVFSCSVMHEALHNH |
| | | | YTQKSLSLSPGKGGGGSGGGGSGGGGSGGGGSGGGGSGGGGSDKTHTCPPCPAPELLGGPSVFLEPPKPKDTLMISRTPE |
| | | | VTCVVVDVSHEDPEVKFNWYVDGVEVHNAKTKPCEEQYGSTYRCVSVLTVLHQDWLNGKEYKCKVSNKALPAPIEKTISK |
| | | | AKGQPREPQVYTLPPSREEMTKNQVSLTCLVKGFYPSDIAVEWESNGQPENNYKTTPPVLDSDGSFFLYSKLTVDKSRWQ |
| | | | QGNVFSCSVMHEALHNHYTQKSLSLSPGK |
| 857 | FL_16xCD | Bi- | QVTLKESGPVLVKPTETLTLTCTVSGFSLRNARMAVSWIRQPPGKTLEWLAHIFSNDEKSYSTSLKSRLTISKDTSKSQV |
| | 3- | specific | VLTMTNMDPVDTATYYCARIVGYGSGWYGYFDYWGQGTLVTVSSGGGGSGGGGSGGGGSDIQMTQSPSSVSASVGDRVTI |
| | scFc_delGK | HLE | TCRASQDIRYDLAWYQQKPGKAPKRLIYAASSLQSGVPSRFSGSGSGTEFTLTISSLQPEDFATYYCLQHNEYPLTEGGG |
| | | molecule | TKVEIKSGGGGSEVQLVESGGGLVQPGGSLKLSCAASGETENKYAMNWVRQAPGKGLEWVARIRSKYNNYATYYADSVKD |
| | | | RFTISRDDSKNTAYLQMNNLKTEDTAVYYCVRHGNFGNSYISYWAYWGQGTLVTVSSGGGGSGGGGSGGGGSQTVVTQEP |
| | | | SLTVSPGGTVTLTCGSSTGAVTSGNYPNWVQQKPGQAPRGLIGGTKFLAPGTPARFSGSLLGGKAALTLSGVQPEDEAEY |
| | | | YCVLWYSNRWVFGGGTKLTVLGGGGDKTHTCPPCPAPELLGGPSVFLEPPKPKDTLMISRTPEVTCVVVDVSHEDPEVKF |
| | | | NWYVDGVEVHNAKTKPCEEQYGSTYRCVSVLTVLHQDWLNGKEYKCKVSNKALPAPIEKTISKAKGQPREPQVYTLPPSR |
| | | | EEMTKNQVSLTCLVKGFYPSDIAVEWESNGQPENNYKTTPPVLDSDGSFFLYSKLTVDKSRWQQGNVFSCSVMHEALHNH |
| | | | YTQKSLSLSPGGGGSGGGGSGGGGSGGGGSGGGGSGGGGSDKTHTCPPCPAPELLGGPSVFLEPPKPKDTLMISRTPEVT |
| | | | CVVVDVSHEDPEVKFNWYVDGVEVHNAKTKPCEEQYGSTYRCVSVLTVLHQDWLNGKEYKCKVSNKALPAPIEKTISKAK |
| | | | GQPREPQVYTLPPSREEMTKNQVSLTCLVKGFYPSDIAVEWESNGQPENNYKTTPPVLDSDGSFFLYSKLTVDKSRWQQG |
| | | | NVFSCSVMHEALHNHYTQKSLSLSPGK |
| 858 | FL_23xCD | Bi- | QVTLKESGPALVKPTETLTLTCTVSGESERNARMGVSWIRQPPGKALEWLAHIFSNDEKSYSTSLKSRLTISKDTSKSQV |
| | 3-scFc | specific | VLTLTNMDPVDTATYFCARMPEYSSGWSGAFDIWGQGTMVTVSSGGGGSGGGGSGGGGSDIQMTQSPSSLSASVGDRVTI |
| | | HLE | TCRASQDIGYDLGWYQQKPGKAPKRLIYAASTLQSGVPSRFSGSGSGTEFTLIISSLQPEDFATYYCLQHNSFPWTFGQG |
| | | molecule | TKVEIKSGGGGSEVQLVESGGGLVQPGGSLKLSCAASGETENKYAMNWVRQAPGKGLEWVARIRSKYNNYATYYADSVKD |
| | | | RFTISRDDSKNTAYLQMNNLKTEDTAVYYCVRHGNFGNSYISYWAYWGQGTLVTVSSGGGGSGGGGSGGGGSQTVVTQEP |
| | | | SLTVSPGGTVTLTCGSSTGAVTSGNYPNWVQQKPGQAPRGLIGGTKFLAPGTPARFSGSLLGGKAALTLSGVQPEDEAEY |
| | | | YCVLWYSNRWVFGGGTKLTVLGGGGDKTHTCPPCPAPELLGGPSVFLEPPKPKDTLMISRTPEVTCVVVDVSHEDPEVKF |
| | | | NWYVDGVEVHNAKTKPCEEQYGSTYRCVSVLTVLHQDWLNGKEYKCKVSNKALPAPIEKTISKAKGQPREPQVYTLPPSR |
| | | | EEMTKNQVSLTCLVKGFYPSDIAVEWESNGQPENNYKTTPPVLDSDGSFFLYSKLTVDKSRWQQGNVFSCSVMHEALHNH |
| | | | YTQKSLSLSPGKGGGGSGGGGSGGGGSGGGGSGGGGSGGGGSDKTHTCPPCPAPELLGGPSVFLEPPKPKDTLMISRTPE |
| | | | VTCVVVDVSHEDPEVKFNWYVDGVEVHNAKTKPCEEQYGSTYRCVSVLTVLHQDWLNGKEYKCKVSNKALPAPIEKTISK |
| | | | AKGQPREPQVYTLPPSREEMTKNQVSLTCLVKGFYPSDIAVEWESNGQPENNYKTTPPVLDSDGSFFLYSKLTVDKSRWQ |
| | | | QGNVFSCSVMHEALHNHYTQKSLSLSPGK |
| 859 | FL_23xCD | Bi- | QVTLKESGPALVKPTETLTLTCTVSGFSFRNARMGVSWIRQPPGKALEWLAHIFSNDEKSYSTSLKSRLTISKDTSKSQV |
| | 3- | specific | VLTLTNMDPVDTATYFCARMPEYSSGWSGAFDIWGQGTMVTVSSGGGGSGGGGSGGGGSDIQMTQSPSSLSASVGDRVTI |
| | scFc_delGK | HLE | TCRASQDIGYDLGWYQQKPGKAPKRLIYAASTLQSGVPSRFSGSGSGTEFTLIISSLQPEDFATYYCLQHNSFPWTFGQG |
| | | molecule | TKVEIKSGGGGSEVQLVESGGGLVQPGGSLKLSCAASGFTFNKYAMNWVRQAPGKGLEWVARIRSKYNNYATYYADSVKD |
| | | | RFTISRDDSKNTAYLQMNNLKTEDTAVYYCVRHGNFGNSYISYWAYWGQGTLVTVSSGGGGSGGGGSGGGGSQTVVTQEP |
| | | | SLTVSPGGTVTLTCGSSTGAVTSGNYPNWVQQKPGQAPRGLIGGTKFLAPGTPARFSGSLLGGKAALTLSGVQPEDEAEY |
| | | | YCVLWYSNRWVFGGGTKLTVLGGGGDKTHTCPPCPAPELLGGPSVFLFPPKPKDTLMISRTPEVTCVVVDVSHEDPEVKF |
| | | | NWYVDGVEVHNAKTKPCEEQYGSTYRCVSVLTVLHQDWLNGKEYKCKVSNKALPAPIEKTISKAKGQPREPQVYTLPPSR |
| | | | EEMTKNQVSLTCLVKGFYPSDIAVEWESNGQPENNYKTTPPVLDSDGSFFLYSKLTVDKSRWQQGNVFSCSVMHEALHNH |
| | | | YTQKSLSLSPGGGGSGGGGSGGGGSGGGGSGGGGSGGGGSDKTHTCPPCPAPELLGGPSVFLFPPKPKDTLMISRTPEVT |
| | | | CVVVDVSHEDPEVKFNWYVDGVEVHNAKTKPCEEQYGSTYRCVSVLTVLHQDWLNGKEYKCKVSNKALPAPIEKTISKAK |
| | | | GQPREPQVYTLPPSREEMTKNQVSLTCLVKGFYPSDIAVEWESNGQPENNYKTTPPVLDSDGSFFLYSKLTVDKSRWQQG |
| | | | NVFSCSVMHEALHNHYTQKSLSLSPGK |
| 860 | FL_36xCD | Bi- | QVTLKESGPTLVKPTETLTLTCTFSGFSLRYARMGVSWIRQPPGKALEWLAHIFSNDEKSYSTSLKSRLTISKDTSKSQV |
| | 3-scFc | specific | VLTLTNMDPVDTATYFCARMPEYSSGWSGAFDIWGQGTMVTVSSGGGGSGGGGSGGGGSDIQMTQSPSSLSASVGDRVTI |
| | | HLE | TCRASQDIRNDLAWYQQKPGKAPKRLIYAASSLQSGVPSRFSGSGSGTEFTLTISSLQPEDFATYYCLQHNSYPLTFGGG |
| | | molecule | TKLEIKSGGGGSEVQLVESGGGLVQPGGSLKLSCAASGFTFNKYAMNWVRQAPGKGLEWVARIRSKYNNYATYYADSVKD |
| | | | RFTISRDDSKNTAYLQMNNLKTEDTAVYYCVRHGNFGNSYISYWAYWGQGTLVTVSSGGGGSGGGGSGGGGSQTVVTQEP |
| | | | SLTVSPGGTVTLTCGSSTGAVTSGNYPNWVQQKPGQAPRGLIGGTKFLAPGTPARFSGSLLGGKAALTLSGVQPEDEAEY |
| | | | YCVLWYSNRWVFGGGTKLTVLGGGGDKTHTCPPCPAPELLGGPSVFLFPPKPKDTLMISRTPEVTCVVVDVSHEDPEVKF |
| | | | NWYVDGVEVHNAKTKPCEEQYGSTYRCVSVLTVLHQDWLNGKEYKCKVSNKALPAPIEKTISKAKGQPREPQVYTLPPSR |
| | | | EEMTKNQVSLTCLVKGFYPSDIAVEWESNGQPENNYKTTPPVLDSDGSFFLYSKLTVDKSRWQQGNVFSCSVMHEALHNH |
| | | | YTQKSLSLSPGKGGGGSGGGGSGGGGSGGGGSGGGGSGGGGSDKTHTCPPCPAPELLGGPSVFLFPPKPKDTLMISRTPE |
| | | | VTCVVVDVSHEDPEVKFNWYVDGVEVHNAKTKPCEEQYGSTYRCVSVLTVLHQDWLNGKEYKCKVSNKALPAPIEKTISK |
| | | | AKGQPREPQVYTLPPSREEMTKNQVSLTCLVKGFYPSDIAVEWESNGQPENNYKTTPPVLDSDGSFFLYSKLTVDKSRWQ |
| | | | QGNVFSCSVMHEALHNHYTQKSLSLSPGK |
| 861 | FL_36xCD | Bi- | QVTLKESGPTLVKPTETLTLTCTFSGFSLRYARMGVSWIRQPPGKALEWLAHIFSNDEKSYSTSLKSRLTISKDTSKSQV |
| | 3- | specific | VLTLTNMDPVDTATYFCARMPEYSSGWSGAFDIWGQGTMVTVSSGGGGSGGGGSGGGGSDIQMTQSPSSLSASVGDRVTI |
| | scFc_delGK | HLE | TCRASQDIRNDLAWYQQKPGKAPKRLIYAASSLQSGVPSRFSGSGSGTEFTLTISSLQPEDFATYYCLQHNSYPLTFGGG |
| | | molecule | TKLEIKSGGGGSEVQLVESGGGLVQPGGSLKLSCAASGFTFNKYAMNWVRQAPGKGLEWVARIRSKYNNYATYYADSVKD |
| | | | RFTISRDDSKNTAYLQMNNLKTEDTAVYYCVRHGNFGNSYISYWAYWGQGTLVTVSSGGGGSGGGGSGGGGSQTVVTQEP |
| | | | SLTVSPGGTVTLTCGSSTGAVTSGNYPNWVQQKPGQAPRGLIGGTKFLAPGTPARFSGSLLGGKAALTLSGVQPEDEAEY |
| | | | YCVLWYSNRWVFGGGTKLTVLGGGGDKTHTCPPCPAPELLGGPSVFLFPPKPKDTLMISRTPEVTCVVVDVSHEDPEVKF |
| | | | NWYVDGVEVHNAKTKPCEEQYGSTYRCVSVLTVLHQDWLNGKEYKCKVSNKALPAPIEKTISKAKGQPREPQVYTLPPSR |
| | | | EEMTKNQVSLTCLVKGFYPSDIAVEWESNGQPENNYKTTPPVLDSDGSFFLYSKLTVDKSRWQQGNVFSCSVMHEALHNH |
| | | | YTQKSLSLSPGGGGSGGGGSGGGGSGGGGSGGGGSGGGGSDKTHTCPPCPAPELLGGPSVFLFPPKPKDTLMISRTPEVT |
| | | | CVVVDVSHEDPEVKFNWYVDGVEVHNAKTKPCEEQYGSTYRCVSVLTVLHQDWLNGKEYKCKVSNKALPAPIEKTISKAK |
| | | | GQPREPQVYTLPPSREEMTKNQVSLTCLVKGFYPSDIAVEWESNGQPENNYKTTPPVLDSDGSFFLYSKLTVDKSRWQQG |
| | | | NVFSCSVMHEALHNHYTQKSLSLSPGK |
| 862 | FL_39_xC | Bi- | QVTLKESGPTLVKPTETLTLTCTLSGFSLNNARMGVSWIRQPPGKCLEWLAHIFSNDEKSYSTSLKNRLTISKDSSKTQV |
| | D3-scFc | specific | VLTMTNVDPVDTATYYCARIVGYGSGWYGFFDYWGQGTLVTVSSGGGGSGGGGSGGGGSDIQMTQSPSSLSASVGDRVTI |
| | | HLE | TCRASQGIRNDLGWYQQKPGKAPKRLIYAASTLQSGVPSRFSGSGSGTEFTLTISSLQPEDFATYYCLQHNSYPLTFGCG |
| | | molecule | TKVEIKSGGGGSEVQLVESGGGLVQPGGSLKLSCAASGFTFNKYAMNWVRQAPGKGLEWVARIRSKYNNYATYYADSVKD |
| | | | RFTISRDDSKNTAYLQMNNLKTEDTAVYYCVRHGNFGNSYISYWAYWGQGTLVTVSSGGGGSGGGGSGGGGSQTVVTQEP |
| | | | SLTVSPGGTVTLTCGSSTGAVTSGNYPNWVQQKPGQAPRGLIGGTKFLAPGTPARFSGSLLGGKAALTLSGVQPEDEAEY |
| | | | YCVLWYSNRWVFGGGTKLTVLGGGGDKTHTCPPCPAPELLGGPSVFLFPPKPKDTLMISRTPEVTCVVVDVSHEDPEVKF |
| | | | NWYVDGVEVHNAKTKPCEEQYGSTYRCVSVLTVLHQDWLNGKEYKCKVSNKALPAPIEKTISKAKGQPREPQVYTLPPSR |
| | | | EEMTKNQVSLTCLVKGFYPSDIAVEWESNGQPENNYKTTPPVLDSDGSFFLYSKLTVDKSRWQQGNVFSCSVMHEALHNH |
| | | | YTQKSLSLSPGKGGGGSGGGGSGGGGSGGGGSGGGGSGGGGSDKTHTCPPCPAPELLGGPSVFLFPPKPKDTLMISRTPE |
| | | | VTCVVVDVSHEDPEVKFNWYVDGVEVHNAKTKPCEEQYGSTYRCVSVLTVLHQDWLNGKEYKCKVSNKALPAPIEKTISK |
| | | | AKGQPREPQVYTLPPSREEMTKNQVSLTCLVKGFYPSDIAVEWESNGQPENNYKTTPPVLDSDGSFFLYSKLTVDKSRWQ |
| | | | QGNVFSCSVMHEALHNHYTQKSLSLSPGK |
| 863 | FL_39_xC | Bi- | QVTLKESGPTLVKPTETLTLTCTLSGFSLNNARMGVSWIRQPPGKCLEWLAHIFSNDEKSYSTSLKNRLTISKDSSKTQV |
| | D3- | specific | VLTMTNVDPVDTATYYCARIVGYGSGWYGFFDYWGQGTLVTVSSGGGGSGGGGSGGGGSDIQMTQSPSSLSASVGDRVTI |
| | scFc_delGK | HLE | TCRASQGIRNDLGWYQQKPGKAPKRLIYAASTLQSGVPSRFSGSGSGTEFTLTISSLQPEDFATYYCLQHNSYPLTFGCG |
| | | molecule | TKVEIKSGGGGSEVQLVESGGGLVQPGGSLKLSCAASGFTFNKYAMNWVRQAPGKGLEWVARIRSKYNNYATYYADSVKD |
| | | | RFTISRDDSKNTAYLQMNNLKTEDTAVYYCVRHGNFGNSYISYWAYWGQGTLVTVSSGGGGSGGGGSGGGGSQTVVTQEP |
| | | | SLTVSPGGTVTLTCGSSTGAVTSGNYPNWVQQKPGQAPRGLIGGTKFLAPGTPARFSGSLLGGKAALTLSGVQPEDEAEY |
| | | | YCVLWYSNRWVFGGGTKLTVLGGGGDKTHTCPPCPAPELLGGPSVFLFPPKPKDTLMISRTPEVTCVVVDVSHEDPEVKF |
| | | | NWYVDGVEVHNAKTKPCEEQYGSTYRCVSVLTVLHQDWLNGKEYKCKVSNKALPAPIEKTISKAKGQPREPQVYTLPPSR |
| | | | EEMTKNQVSLTCLVKGFYPSDIAVEWESNGQPENNYKTTPPVLDSDGSFFLYSKLTVDKSRWQQGNVFSCSVMHEALHNH |
| | | | YTQKSLSLSPGGGGSGGGGSGGGGSGGGGSGGGGSGGGGSDKTHTCPPCPAPELLGGPSVFLFPPKPKDTLMISRTPEVT |
| | | | CVVVDVSHEDPEVKFNWYVDGVEVHNAKTKPCEEQYGSTYRCVSVLTVLHQDWLNGKEYKCKVSNKALPAPIEKTISKAK |
| | | | GQPREPQVYTLPPSREEMTKNQVSLTCLVKGFYPSDIAVEWESNGQPENNYKTTPPVLDSDGSFFLYSKLTVDKSRWQQG |
| | | | NVFSCSVMHEALHNHYTQKSLSLSPGK |
| 864 | FL_42_xC | Bi- | QVTLKESGPALVKPTETLTLTCTLSGFSLNNARMAVSWIRQPPGKCLEWLAHIFSNDEKSYSTSLKSRLTISKDTSKSQV |
| | D3-scFc | specific | VLTMTNMDPEDTATYYCARIVGYGTGWYGFFDYWGQGILVTVSSGGGGSGGGGSGGGGSDIQMTQSPSSLSASVGDRVTI |
| | | HLE | TCRASQGIRNDLAWYQQKPGKAPKRLIYAASSLQSGVPSRFSGSGSGTEFTLTISSLQPEDFATYYCLQHNSYPLTFGCG |
| | | molecule | TKVEIKSGGGGSEVQLVESGGGLVQPGGSLKLSCAASGFTFNKYAMNWVRQAPGKGLEWVARIRSKYNNYATYYADSVKD |
| | | | RFTISRDDSKNTAYLQMNNLKTEDTAVYYCVRHGNFGNSYISYWAYWGQGTLVTVSSGGGGSGGGGSGGGGSQTVVTQEP |
| | | | SLTVSPGGTVTLTCGSSTGAVTSGNYPNWVQQKPGQAPRGLIGGTKFLAPGTPARFSGSLLGGKAALTLSGVQPEDEAEY |
| | | | YCVLWYSNRWVFGGGTKLTVLGGGGDKTHTCPPCPAPELLGGPSVFLFPPKPKDTLMISRTPEVTCVVVDVSHEDPEVKF |
| | | | NWYVDGVEVHNAKTKPCEEQYGSTYRCVSVLTVLHQDWLNGKEYKCKVSNKALPAPIEKTISKAKGQPREPQVYTLPPSR |
| | | | EEMTKNQVSLTCLVKGFYPSDIAVEWESNGQPENNYKTTPPVLDSDGSFFLYSKLTVDKSRWQQGNVFSCSVMHEALHNH |
| | | | YTQKSLSLSPGKGGGGSGGGGSGGGGSGGGGSGGGGSGGGGSDKTHTCPPCPAPELLGGPSVFLFPPKPKDTLMISRTPE |
| | | | VTCVVVDVSHEDPEVKFNWYVDGVEVHNAKTKPCEEQYGSTYRCVSVLTVLHQDWLNGKEYKCKVSNKALPAPIEKTISK |
| | | | AKGQPREPQVYTLPPSREEMTKNQVSLTCLVKGFYPSDIAVEWESNGQPENNYKTTPPVLDSDGSFFLYSKLTVDKSRWQ |
| | | | QGNVFSCSVMHEALHNHYTQKSLSLSPGK |
| 865 | FL_42_xC | Bi- | QVTLKESGPALVKPTETLTLTCTLSGFSLNNARMAVSWIRQPPGKCLEWLAHIFSNDEKSYSTSLKSRLTISKDTSKSQV |
| | D3- | specific | VLTMTNMDPEDTATYYCARIVGYGTGWYGFFDYWGQGILVTVSSGGGGSGGGGSGGGGSDIQMTQSPSSLSASVGDRVTI |
| | scFc_delGK | HLE | TCRASQGIRNDLAWYQQKPGKAPKRLIYAASSLQSGVPSRFSGSGSGTEFTLTISSLQPEDFATYYCLQHNSYPLTFGCG |
| | | molecule | TKVEIKSGGGGSEVQLVESGGGLVQPGGSLKLSCAASGFTFNKYAMNWVRQAPGKGLEWVARIRSKYNNYATYYADSVKD |
| | | | RFTISRDDSKNTAYLQMNNLKTEDTAVYYCVRHGNFGNSYISYWAYWGQGTLVTVSSGGGGSGGGGSGGGGSQTVVTQEP |
| | | | SLTVSPGGTVTLTCGSSTGAVTSGNYPNWVQQKPGQAPRGLIGGTKFLAPGTPARFSGSLLGGKAALTLSGVQPEDEAEY |
| | | | YCVLWYSNRWVFGGGTKLTVLGGGGDKTHTCPPCPAPELLGGPSVFLFPPKPKDTLMISRTPEVTCVVVDVSHEDPEVKF |
| | | | NWYVDGVEVHNAKTKPCEEQYGSTYRCVSVLTVLHQDWLNGKEYKCKVSNKALPAPIEKTISKAKGQPREPQVYTLPPSR |
| | | | EEMTKNQVSLTCLVKGFYPSDIAVEWESNGQPENNYKTTPPVLDSDGSFFLYSKLTVDKSRWQQGNVFSCSVMHEALHNH |
| | | | YTQKSLSLSPGGGGSGGGGSGGGGSGGGGSGGGGSGGGGSDKTHTCPPCPAPELLGGPSVFLFPPKPKDTLMISRTPEVT |
| | | | CVVVDVSHEDPEVKFNWYVDGVEVHNAKTKPCEEQYGSTYRCVSVLTVLHQDWLNGKEYKCKVSNKALPAPIEKTISKAK |
| | | | GQPREPQVYTLPPSREEMTKNQVSLTCLVKGFYPSDIAVEWESNGQPENNYKTTPPVLDSDGSFFLYSKLTVDKSRWQQG |
| | | | NVFSCSVMHEALHNHYTQKSLSLSPGK |
| 866 | FL_46_CCx | Bi- | QVTLKESGPVLVKPTQTLTLTCTFSGFSLSNARMGVSWIRQPPGKCLEWLALIYWNDDKRYSPSLKSRLTITKDTSKNQV |
| | CD3-scFc | specific | VLTMTNMDPVDTATYYCARMVGYGSGWYAYFDYWGQGTLVTVSSGGGGSGGGGSGGGGSDIQMTQSPSSLSASVGDRVTI |
| | | HLE | TCRASQGIRNDLGWYQQKPGKAPKRLIYAASSLQSGVPSRFSGSGSGTEFTLTISSLQPEDFATYYCLQHNSYPLTFGCG |
| | | molecule | TKVEIKSGGGGSEVQLVESGGGLVQPGGSLKLSCAASGFTFNKYAMNWVRQAPGKGLEWVARIRSKYNNYATYYADSVKD |
| | | | RFTISRDDSKNTAYLQMNNLKTEDTAVYYCVRHGNFGNSYISYWAYWGQGTLVTVSSGGGGSGGGGSGGGGSQTVVTQEP |
| | | | SLTVSPGGTVTLTCGSSTGAVTSGNYPNWVQQKPGQAPRGLIGGTKFLAPGTPARFSGSLLGGKAALTLSGVQPEDEAEY |
| | | | YCVLWYSNRWVFGGGTKLTVLGGGGDKTHTCPPCPAPELLGGPSVFLFPPKPKDTLMISRTPEVTCVVVDVSHEDPEVKF |
| | | | NWYVDGVEVHNAKTKPCEEQYGSTYRCVSVLTVLHQDWLNGKEYKCKVSNKALPAPIEKTISKAKGQPREPQVYTLPPSR |
| | | | EEMTKNQVSLTCLVKGFYPSDIAVEWESNGQPENNYKTTPPVLDSDGSFFLYSKLTVDKSRWQQGNVFSCSVMHEALHNH |
| | | | YTQKSLSLSPGKGGGGSGGGGSGGGGSGGGGSGGGGSGGGGSDKTHTCPPCPAPELLGGPSVFLFPPKPKDTLMISRTPE |
| | | | VTCVVVDVSHEDPEVKFNWYVDGVEVHNAKTKPCEEQYGSTYRCVSVLTVLHQDWLNGKEYKCKVSNKALPAPIEKTISK |
| | | | AKGQPREPQVYTLPPSREEMTKNQVSLTCLVKGFYPSDIAVEWESNGQPENNYKTTPPVLDSDGSFFLYSKLTVDKSRWQ |
| | | | QGNVFSCSVMHEALHNHYTQKSLSLSPGK |
| 867 | FL_46_CCx | Bi- | QVTLKESGPVLVKPTQTLTLTCTFSGFSLSNARMGVSWIRQPPGKCLEWLALIYWNDDKRYSPSLKSRLTITKDTSKNQV |
| | CD3- | specific | VLTMTNMDPVDTATYYCARMVGYGSGWYAYFDYWGQGTLVTVSSGGGGSGGGGSGGGGSDIQMTQSPSSLSASVGDRVTI |
| | scFc_delGK | HLE | TCRASQGIRNDLGWYQQKPGKAPKRLIYAASSLQSGVPSRFSGSGSGTEFTLTISSLQPEDFATYYCLQHNSYPLTFGCG |
| | | molecule | TKVEIKSGGGGSEVQLVESGGGLVQPGGSLKLSCAASGFTFNKYAMNWVRQAPGKGLEWVARIRSKYNNYATYYADSVKD |
| | | | RFTISRDDSKNTAYLQMNNLKTEDTAVYYCVRHGNFGNSYISYWAYWGQGTLVTVSSGGGGSGGGGSGGGGSQTVVTQEP |
| | | | SLTVSPGGTVTLTCGSSTGAVTSGNYPNWVQQKPGQAPRGLIGGTKFLAPGTPARFSGSLLGGKAALTLSGVQPEDEAEY |
| | | | YCVLWYSNRWVFGGGTKLTVLGGGGDKTHTCPPCPAPELLGGPSVFLFPPKPKDTLMISRTPEVTCVVVDVSHEDPEVKF |
| | | | NWYVDGVEVHNAKTKPCEEQYGSTYRCVSVLTVLHQDWLNGKEYKCKVSNKALPAPIEKTISKAKGQPREPQVYTLPPSR |
| | | | EEMTKNQVSLTCLVKGFYPSDIAVEWESNGQPENNYKTTPPVLDSDGSFFLYSKLTVDKSRWQQGNVFSCSVMHEALHNH |
| | | | YTQKSLSLSPGGGGSGGGGSGGGGSGGGGSGGGGSGGGGSDKTHTCPPCPAPELLGGPSVFLFPPKPKDTLMISRTPEVT |
| | | | CVVVDVSHEDPEVKFNWYVDGVEVHNAKTKPCEEQYGSTYRCVSVLTVLHQDWLNGKEYKCKVSNKALPAPIEKTISKAK |
| | | | GQPREPQVYTLPPSREEMTKNQVSLTCLVKGFYPSDIAVEWESNGQPENNYKTTPPVLDSDGSFFLYSKLTVDKSRWQQG |
| | | | NVFSCSVMHEALHNHYTQKSLSLSPGK |
| 868 | FL_52_CCx | Bi- | QVTLKESGPTLVKPTETLTLTCTFSGFSLRYARMGVSWIRQPPGKCLEWLAHIFSNDEKSYSTSLKSRLTISKDTSKSQV |
| | CD3-scFc | specific | VLTLTNMDPVDTATYFCARMPEYSSGWSGAFDIWGQGTMVTVSSGGGGSGGGGSGGGGSDIQMTQSPSSLSASVGDRVTI |
| | | HLE | TCRASQDIRNDLAWYQQKPGKAPKRLIYAASSLQSGVPSRFSGSGSGTEFTLTISSLQPEDFATYYCLQHNSYPLTFGCG |
| | | molecule | TKLEIKSGGGGSEVQLVESGGGLVQPGGSLKLSCAASGFTFNKYAMNWVRQAPGKGLEWVARIRSKYNNYATYYADSVKD |
| | | | RFTISRDDSKNTAYLQMNNLKTEDTAVYYCVRHGNFGNSYISYWAYWGQGTLVTVSSGGGGSGGGGSGGGGSQTVVTQEP |
| | | | SLTVSPGGTVTLTCGSSTGAVTSGNYPNWVQQKPGQAPRGLIGGTKFLAPGTPARFSGSLLGGKAALTLSGVQPEDEAEY |
| | | | YCVLWYSNRWVFGGGTKLTVLGGGGDKTHTCPPCPAPELLGGPSVFLFPPKPKDTLMISRTPEVTCVVVDVSHEDPEVKF |
| | | | NWYVDGVEVHNAKTKPCEEQYGSTYRCVSVLTVLHQDWLNGKEYKCKVSNKALPAPIEKTISKAKGQPREPQVYTLPPSR |
| | | | EEMTKNQVSLTCLVKGFYPSDIAVEWESNGQPENNYKTTPPVLDSDGSFFLYSKLTVDKSRWQQGNVFSCSVMHEALHNH |
| | | | YTQKSLSLSPGKGGGGSGGGGSGGGGSGGGGSGGGGSGGGGSDKTHTCPPCPAPELLGGPSVFLFPPKPKDTLMISRTPE |
| | | | VTCVVVDVSHEDPEVKFNWYVDGVEVHNAKTKPCEEQYGSTYRCVSVLTVLHQDWLNGKEYKCKVSNKALPAPIEKTISK |
| | | | AKGQPREPQVYTLPPSREEMTKNQVSLTCLVKGFYPSDIAVEWESNGQPENNYKTTPPVLDSDGSFFLYSKLTVDKSRWQ |
| | | | QGNVFSCSVMHEALHNHYTQKSLSLSPGK |
| 869 | FL_52_CCx | Bi- | QVTLKESGPTLVKPTETLTLTCTFSGFSLRYARMGVSWIRQPPGKCLEWLAHIFSNDEKSYSTSLKSRLTISKDTSKSQV |
| | CD3- | specific | VLTLTNMDPVDTATYFCARMPEYSSGWSGAFDIWGQGTMVTVSSGGGGSGGGGSGGGGSDIQMTQSPSSLSASVGDRVTI |
| | scFc_delGK | HLE | TCRASQDIRNDLAWYQQKPGKAPKRLIYAASSLQSGVPSRFSGSGSGTEFTLTISSLQPEDFATYYCLQHNSYPLTFGCG |
| | | molecule | TKLEIKSGGGGSEVQLVESGGGLVQPGGSLKLSCAASGFTFNKYAMNWVRQAPGKGLEWVARIRSKYNNYATYYADSVKD |
| | | | RFTISRDDSKNTAYLQMNNLKTEDTAVYYCVRHGNFGNSYISYWAYWGQGTLVTVSSGGGGSGGGGSGGGGSQTVVTQEP |
| | | | SLTVSPGGTVTLTCGSSTGAVTSGNYPNWVQQKPGQAPRGLIGGTKFLAPGTPARFSGSLLGGKAALTLSGVQPEDEAEY |
| | | | YCVLWYSNRWVFGGGTKLTVLGGGGDKTHTCPPCPAPELLGGPSVFLFPPKPKDTLMISRTPEVTCVVVDVSHEDPEVKF |
| | | | NWYVDGVEVHNAKTKPCEEQYGSTYRCVSVLTVLHQDWLNGKEYKCKVSNKALPAPIEKTISKAKGQPREPQVYTLPPSR |
| | | | EEMTKNQVSLTCLVKGFYPSDIAVEWESNGQPENNYKTTPPVLDSDGSFFLYSKLTVDKSRWQQGNVFSCSVMHEALHNH |
| | | | YTQKSLSLSPGGGGSGGGGSGGGGSGGGGSGGGGSGGGGSDKTHTCPPCPAPELLGGPSVFLFPPKPKDTLMISRTPEVT |
| | | | CVVVDVSHEDPEVKFNWYVDGVEVHNAKTKPCEEQYGSTYRCVSVLTVLHQDWLNGKEYKCKVSNKALPAPIEKTISKAK |
| | | | GQPREPQVYTLPPSREEMTKNQVSLTCLVKGFYPSDIAVEWESNGQPENNYKTTPPVLDSDGSFFLYSKLTVDKSRWQQG |
| | | | NVFSCSVMHEALHNHYTQKSLSLSPGK |
| 870 | FL_61xCD | Bi- | QVQLVESGGGVVQPGRSLRLSCAASGFTFSSYGMHWVRQAPGKGLEWVAVISYEGSNEFYAESVKGRFTISRDNSKNTLY |
| | 3-scFc | specific | LQMNSLRAEDTAVYYCARGGEITMVRGVIGYYYYGMDVWGQGTTVTVSSGGGGSGGGGSGGGGSDIQMTQSPSSLSASVG |
| | | HLE | DRVTITCRASQSISSYLNWYQQKPGKAPKLLIYAASSLQSGVPSRFSGSGSGTEFTLTISSLQPEDFATYYCLQHNSYPL |
| | | molecule | TFGGGTKVEIKSGGGGSEVQLVESGGGLVQPGGSLKLSCAASGFTFNKYAMNWVRQAPGKGLEWVARIRSKYNNYATYYA |
| | | | DSVKDRFTISRDDSKNTAYLQMNNLKTEDTAVYYCVRHGNFGNSYISYWAYWGQGTLVTVSSGGGGSGGGGSGGGGSQTV |
| | | | VTQEPSLTVSPGGTVTLTCGSSTGAVTSGNYPNWVQQKPGQAPRGLIGGTKFLAPGTPARFSGSLLGGKAALTLSGVQPE |
| | | | DEAEYYCVLWYSNRWVFGGGTKLTVLGGGGDKTHTCPPCPAPELLGGPSVFLFPPKPKDTLMISRTPEVTCVVVDVSHED |
| | | | PEVKFNWYVDGVEVHNAKTKPCEEQYGSTYRCVSVLTVLHQDWLNGKEYKCKVSNKALPAPIEKTISKAKGQPREPQVYT |
| | | | LPPSREEMTKNQVSLTCLVKGFYPSDIAVEWESNGQPENNYKTTPPVLDSDGSFFLYSKLTVDKSRWQQGNVFSCSVMHE |
| | | | ALHNHYTQKSLSLSPGKGGGGSGGGGSGGGGSGGGGSGGGGSGGGGSDKTHTCPPCPAPELLGGPSVFLFPPKPKDTLMI |
| | | | SRTPEVTCVVVDVSHEDPEVKFNWYVDGVEVHNAKTKPCEEQYGSTYRCVSVLTVLHQDWLNGKEYKCKVSNKALPAPIE |
| | | | KTISKAKGQPREPQVYTLPPSREEMTKNQVSLTCLVKGFYPSDIAVEWESNGQPENNYKTTPPVLDSDGSFFLYSKLTVD |
| | | | KSRWQQGNVFSCSVMHEALHNHYTQKSLSLSPGK |
| 871 | FL_61xCD | Bi- | QVQLVESGGGVVQPGRSLRLSCAASGFTFSSYGMHWVRQAPGKGLEWVAVISYEGSNEFYAESVKGRFTISRDNSKNTLY |
| | 3- | specific | LQMNSLRAEDTAVYYCARGGEITMVRGVIGYYYYGMDVWGQGTTVTVSSGGGGSGGGGSGGGGSDIQMTQSPSSLSASVG |
| | scFc_delGK | HLE | DRVTITCRASQSISSYLNWYQQKPGKAPKLLIYAASSLQSGVPSRFSGSGSGTEFTLTISSLQPEDFATYYCLQHNSYPL |
| | | molecule | TFGGGTKVEIKSGGGGSEVQLVESGGGLVQPGGSLKLSCAASGFTFNKYAMNWVRQAPGKGLEWVARIRSKYNNYATYYA |
| | | | DSVKDRFTISRDDSKNTAYLQMNNLKTEDTAVYYCVRHGNFGNSYISYWAYWGQGTLVTVSSGGGGSGGGGSGGGGSQTV |
| | | | VTQEPSLTVSPGGTVTLTCGSSTGAVTSGNYPNWVQQKPGQAPRGLIGGTKFLAPGTPARFSGSLLGGKAALTLSGVQPE |
| | | | DEAEYYCVLWYSNRWVFGGGTKLTVLGGGGDKTHTCPPCPAPELLGGPSVFLFPPKPKDTLMISRTPEVTCVVVDVSHED |
| | | | PEVKFNWYVDGVEVHNAKTKPCEEQYGSTYRCVSVLTVLHQDWLNGKEYKCKVSNKALPAPIEKTISKAKGQPREPQVYT |
| | | | LPPSREEMTKNQVSLTCLVKGFYPSDIAVEWESNGQPENNYKTTPPVLDSDGSFFLYSKLTVDKSRWQQGNVFSCSVMHE |
| | | | ALHNHYTQKSLSLSPGGGGSGGGGSGGGGSGGGGSGGGGSGGGGSDKTHTCPPCPAPELLGGPSVFLFPPKPKDTLMISR |
| | | | TPEVTCVVVDVSHEDPEVKFNWYVDGVEVHNAKTKPCEEQYGSTYRCVSVLTVLHQDWLNGKEYKCKVSNKALPAPIEKT |
| | | | ISKAKGQPREPQVYTLPPSREEMTKNQVSLTCLVKGFYPSDIAVEWESNGQPENNYKTTPPVLDSDGSFFLYSKLTVDKS |
| | | | RWQQGNVFSCSVMHEALHNHYTQKSLSLSPGK |

The application's sequence listing, which the Patent Office published only in electronic form, follows.

SEQUENCE LISTING (871 sequences)

SEQ ID NO: 1 - protein, 4 aa, Artificial Sequence
  Synthetic peptide
GGGG

SEQ ID NO: 2 - protein, 5 aa, Artificial Sequence
  Synthetic peptide
GGGGS

SEQ ID NO: 3 - protein, 5 aa, Artificial Sequence
  Synthetic peptide
GGGGQ

SEQ ID NO: 4 - protein, 6 aa, Artificial Sequence
  Synthetic peptide
PGGGGS

SEQ ID NO: 5 - protein, 6 aa, Artificial Sequence
  Synthetic peptide
PGGDGS

SEQ ID NO: 6 - protein, 6 aa, Artificial Sequence
  Synthetic peptide
SGGGGS

SEQ ID NO: 7 - protein, 9 aa, Artificial Sequence
  Synthetic peptide
GGGGSGGGS

SEQ ID NO: 8 - protein, 10 aa, Artificial Sequence
  Synthetic peptide
GGGGSGGGGS

SEQ ID NO: 9 - protein, 15 aa, Artificial Sequence
  Synthetic peptide
GGGGSGGGGSGGGGS

SEQ ID NO: 10 - protein, 6 aa, Artificial Sequence
  Synthetic peptide
HHHHHH

SEQ ID NO: 11 - protein, 14 aa, Artificial Sequence
  Synthetic peptide
GSSTGAVTSGYYPN

SEQ ID NO: 12 - protein, 7 aa, Artificial Sequence
  Synthetic peptide
GTKFLAP

SEQ ID NO: 13 - protein, 9 aa, Artificial Sequence
  Synthetic peptide
ALWYSNRWV

SEQ ID NO: 14 - protein, 5 aa, Artificial Sequence
  Synthetic peptide
IYAMN

SEQ ID NO: 15 - protein, 19 aa, Artificial Sequence
  Synthetic peptide
RIRSKYNNYATYYADSVKS

SEQ ID NO: 16 - protein, 14 aa, Artificial Sequence
  Synthetic peptide
HGNFGNSYVSFFAY

SEQ ID NO: 17 - protein, 125 aa, Artificial Sequence
  Synthetic peptide
EVQLVESGGGLVQPGGSLKLSCAASGFTFNIYAMNWVRQAPGKGLEWVARIRSKYNNYATYYADSVKSRFTISRDDSKNTAYLQMNNLKTEDTAVYYCVRHGNFGNSYVSFFAYWGQGTLVTVSS

SEQ ID NO: 18 - protein, 109 aa, Artificial Sequence
  Synthetic peptide
QTVVTQEPSLTVSPGGTVTLTCGSSTGAVTSGYYPNWVQQKPGQAPRGLIGGTKFLAPGTPARFSGSLLGGKAALTLSGVQPEDEAEYYCALWYSNRWVFGGGTKLTVL

SEQ ID NO: 19 - protein, 249 aa, Artificial Sequence
  Synthetic peptide
EVQLVESGGGLVQPGGSLKLSCAASGFTFNIYAMNWVRQAPGKGLEWVARIRSKYNNYATYYADSVKSRFTISRDDSKNTAYLQMNNLKTEDTAVYYCVRHGNFGNSYVSFFAYWGQGTLVTVSSGGGGSGGGGSGGGGSQTVVTQEPSLTVSPGGTVTLTCGSSTGAVTSGYYPNWVQQKPGQAPRGLIGGTKFLAPGTPARFSGSLLGGKAALTLSGVQPEDEAEYYCALWYSNRWVFGGGTKLTVL

SEQ ID NO: 20 - protein, 14 aa, Artificial Sequence
  Synthetic peptide
GSSTGAVTSGYYPN

SEQ ID NO: 21 - protein, 7 aa, Artificial Sequence
  Synthetic peptide
GTKFLAP

SEQ ID NO: 22 - protein, 9 aa, Artificial Sequence
  Synthetic peptide
ALWYSNRWV

SEQ ID NO: 23 - protein, 5 aa, Artificial Sequence
  Synthetic peptide
KYAMN

SEQ ID NO: 24 - protein, 19 aa, Artificial Sequence
  Synthetic peptide
RIRSKYNNYATYYADSVKD

SEQ ID NO: 25 - protein, 14 aa, Artificial Sequence
  Synthetic peptide
HGNFGNSYISYWAY

SEQ ID NO: 26 - protein, 125 aa, Artificial Sequence
  Synthetic peptide
EVQLVESGGGLVQPGGSLKLSCAASGFTFNKYAMNWVRQAPGKGLEWVARIRSKYNNYATYYADSVKDRFTISRDDSKNTAYLQMNNLKTEDTAVYYCVRHGNFGNSYISYWAYWGQGTLVTVSS

SEQ ID NO: 27 - protein, 109 aa, Artificial Sequence; identical to SEQ ID NO: 18
  Synthetic peptide

SEQ ID NO: 28 - protein, 249 aa, Artificial Sequence
  Synthetic peptide
EVQLVESGGGLVQPGGSLKLSCAASGFTFNKYAMNWVRQAPGKGLEWVARIRSKYNNYATYYADSVKDRFTISRDDSKNTAYLQMNNLKTEDTAVYYCVRHGNFGNSYISYWAYWGQGTLVTVSSGGGGSGGGGSGGGGSQTVVTQEPSLTVSPGGTVTLTCGSSTGAVTSGYYPNWVQQKPGQAPRGLIGGTKFLAPGTPARFSGSLLGGKAALTLSGVQPEDEAEYYCALWYSNRWVFGGGTKLTVL

SEQ ID NO: 29 - protein, 14 aa, Artificial Sequence
  Synthetic peptide
GSSTGAVTSGYYPN

SEQ ID NO: 30 - protein, 7 aa, Artificial Sequence
  Synthetic peptide
GTKFLAP

SEQ ID NO: 31 - protein, 9 aa, Artificial Sequence
  Synthetic peptide
ALWYSNRWV

SEQ ID NO: 32 - protein, 5 aa, Artificial Sequence
  Synthetic peptide
SYAMN

SEQ ID NO: 33 - protein, 19 aa, Artificial Sequence
  Synthetic peptide
RIRSKYNNYATYYADSVKG

SEQ ID NO: 34 - protein, 14 aa, Artificial Sequence
  Synthetic peptide
HGNFGNSYLSFWAY

SEQ ID NO: 35 - protein, 125 aa, Artificial Sequence
  Synthetic peptide
EVQLVESGGGLEQPGGSLKLSCAASGFTFNSYAMNWVRQAPGKGLEWVARIRSKYNNYATYYADSVKGRFTISRDDSKNTAYLQMNNLKTEDTAVYYCVRHGNFGNSYLSFWAYWGQGTLVTVSS

SEQ ID NO: 36 - protein, 109 aa, Artificial Sequence; identical to SEQ ID NO: 18
  Synthetic peptide

SEQ ID NO: 37 - protein, 249 aa, Artificial Sequence
  Synthetic peptide
EVQLVESGGGLEQPGGSLKLSCAASGFTFNSYAMNWVRQAPGKGLEWVARIRSKYNNYATYYADSVKGRFTISRDDSKNTAYLQMNNLKTEDTAVYYCVRHGNFGNSYLSFWAYWGQGTLVTVSSGGGGSGGGGSGGGGSQTVVTQEPSLTVSPGGTVTLTCGSSTGAVTSGYYPNWVQQKPGQAPRGLIGGTKFLAPGTPARFSGSLLGGKAALTLSGVQPEDEAEYYCALWYSNRWVFGGGTKLTVL

SEQ ID NO: 38 - protein, 14 aa, Artificial Sequence
  Synthetic peptide
GSSTGAVTSGYYPN

SEQ ID NO: 39 - protein, 7 aa, Artificial Sequence
  Synthetic peptide
GTKFLAP

SEQ ID NO: 40 - protein, 9 aa, Artificial Sequence
  Synthetic peptide
ALWYSNRWV

SEQ ID NO: 41 - protein, 5 aa, Artificial Sequence
  Synthetic peptide
RYAMN

SEQ ID NO: 42 - protein, 19 aa, Artificial Sequence
  Synthetic peptide
RIRSKYNNYATYYADSVKG

SEQ ID NO: 43 - protein, 14 aa, Artificial Sequence
  Synthetic peptide
HGNFGNSYLSYFAY

SEQ ID NO: 44 - protein, 125 aa, Artificial Sequence
  Synthetic peptide
EVQLVESGGGLVQPGGSLKLSCAASGFTFNRYAMNWVRQAPGKGLEWVARIRSKYNNYATYYADSVKGRFTISRDDSKNTAYLQMNNLKTEDTAVYYCVRHGNFGNSYLSYFAYWGQGTLVTVSS

SEQ ID NO: 45 - protein, 109 aa, Artificial Sequence; identical to SEQ ID NO: 18
  Synthetic peptide

SEQ ID NO: 46 - protein, 249 aa, Artificial Sequence
  Synthetic peptide
EVQLVESGGGLVQPGGSLKLSCAASGFTFNRYAMNWVRQAPGKGLEWVARIRSKYNNYATYYADSVKGRFTISRDDSKNTAYLQMNNLKTEDTAVYYCVRHGNFGNSYLSYFAYWGQGTLVTVSSGGGGSGGGGSGGGGSQTVVTQEPSLTVSPGGTVTLTCGSSTGAVTSGYYPNWVQQKPGQAPRGLIGGTKFLAPGTPARFSGSLLGGKAALTLSGVQPEDEAEYYCALWYSNRWVFGGGTKLTVL

SEQ ID NO: 47 - protein, 14 aa, Artificial Sequence
  Synthetic peptide
RSSTGAVTSGYYPN

SEQ ID NO: 48 - protein, 7 aa, Artificial Sequence
  Synthetic peptide
ATDMRPS

SEQ ID NO: 49 - protein, 9 aa, Artificial Sequence
  Synthetic peptide
ALWYSNRWV

SEQ ID NO: 50 - protein, 5 aa, Artificial Sequence
  Synthetic peptide
VYAMN

SEQ ID NO: 51 - protein, 19 aa, Artificial Sequence
  Synthetic peptide
RIRSKYNNYATYYADSVKK

SEQ ID NO: 52 - protein, 14 aa, Artificial Sequence
  Synthetic peptide
HGNFGNSYLSWWAY

SEQ ID NO: 53 - protein, 125 aa, Artificial Sequence
  Synthetic peptide
EVQLVESGGGLVQPGGSLKLSCAASGFTFNVYAMNWVRQAPGKGLEWVARIRSKYNNYATYYADSVKKRFTISRDDSKNTAYLQMNNLKTEDTAVYYCVRHGNFGNSYLSWWAYWGQGTLVTVSS

SEQ ID NO: 54 - protein, 109 aa, Artificial Sequence
  Synthetic peptide
QTVVTQEPSLTVSPGGTVTLTCRSSTGAVTSGYYPNWVQQKPGQAPRGLIGATDMRPSGTPARFSGSLLGGKAALTLSGVQPEDEAEYYCALWYSNRWVFGGGTKLTVL

SEQ ID NO: 55 - protein, 249 aa, Artificial Sequence
  Synthetic peptide
EVQLVESGGGLVQPGGSLKLSCAASGFTFNVYAMNWVRQAPGKGLEWVARIRSKYNNYATYYADSVKKRFTISRDDSKNTAYLQMNNLKTEDTAVYYCVRHGNFGNSYLSWWAYWGQGTLVTVSSGGGGSGGGGSGGGGSQTVVTQEPSLTVSPGGTVTLTCRSSTGAVTSGYYPNWVQQKPGQAPRGLIGATDMRPSGTPARFSGSLLGGKAALTLSGVQPEDEAEYYCALWYSNRWVFGGGTKLTVL

SEQ ID NO: 56 - protein, 14 aa, Artificial Sequence
  Synthetic peptide
GSSTGAVTSGYYPN

SEQ ID NO: 57 - protein, 7 aa, Artificial Sequence
  Synthetic peptide
GTKFLAP

SEQ ID NO: 58 - protein, 9 aa, Artificial Sequence
  Synthetic peptide
ALWYSNRWV

SEQ ID NO: 59 - protein, 5 aa, Artificial Sequence
  Synthetic peptide
KYAMN

SEQ ID NO: 60 - protein, 19 aa, Artificial Sequence
  Synthetic peptide
RIRSKYNNYATYYADSVKS

SEQ ID NO: 61 - protein, 14 aa, Artificial Sequence
  Synthetic peptide
HGNFGNSYTSYYAY

SEQ ID NO: 62 - protein, 125 aa, Artificial Sequence
  Synthetic peptide
EVQLVESGGGLVQPGGSLKLSCAASGFTFNKYAMNWVRQAPGKGLEWVARIRSKYNNYATYYADSVKSRFTISRDDSKNTAYLQMNNLKTEDTAVYYCVRHGNFGNSYTSYYAYWGQGTLVTVSS

SEQ ID NO: 63 - protein, 109 aa, Artificial Sequence; identical to SEQ ID NO: 18
  Synthetic peptide

SEQ ID NO: 64 - protein, 249 aa, Artificial Sequence
  Synthetic peptide
EVQLVESGGGLVQPGGSLKLSCAASGFTFNKYAMNWVRQAPGKGLEWVARIRSKYNNYATYYADSVKSRFTISRDDSKNTAYLQMNNLKTEDTAVYYCVRHGNFGNSYTSYYAYWGQGTLVTVSSGGGGSGGGGSGGGGSQTVVTQEPSLTVSPGGTVTLTCGSSTGAVTSGYYPNWVQQKPGQAPRGLIGGTKFLAPGTPARFSGSLLGGKAALTLSGVQPEDEAEYYCALWYSNRWVFGGGTKLTVL

SEQ ID NO: 65 - protein, 14 aa, Artificial Sequence
  Synthetic peptide
RSSTGAVTSGYYPN

SEQ ID NO: 66 - protein, 7 aa, Artificial Sequence
  Synthetic peptide
ATDMRPS

SEQ ID NO: 67 - protein, 9 aa, Artificial Sequence
  Synthetic peptide
ALWYSNRWV

SEQ ID NO: 68 - protein, 5 aa, Artificial Sequence
  Synthetic peptide
GYAMN

SEQ ID NO: 69 - protein, 19 aa, Artificial Sequence
  Synthetic peptide
RIRSKYNNYATYYADSVKE

SEQ ID NO: 70 - protein, 14 aa, Artificial Sequence
  Synthetic peptide
HRNFGNSYLSWFAY

SEQ ID NO: 71 - protein, 125 aa, Artificial Sequence
  Synthetic peptide
EVQLVESGGGLVQPGGSLKLSCAASGFTFNGYAMNWVRQAPGKGLEWVARIRSKYNNYATYYADSVKERFTISRDDSKNTAYLQMNNLKTEDTAVYYCVRHRNFGNSYLSWFAYWGQGTLVTVSS

SEQ ID NO: 72 - protein, 109 aa, Artificial Sequence; identical to SEQ ID NO: 54
  Synthetic peptide

SEQ ID NO: 73 - protein, 249 aa, Artificial Sequence
  Synthetic peptide
EVQLVESGGGLVQPGGSLKLSCAASGFTFNGYAMNWVRQAPGKGLEWVARIRSKYNNYATYYADSVKERFTISRDDSKNTAYLQMNNLKTEDTAVYYCVRHRNFGNSYLSWFAYWGQGTLVTVSSGGGGSGGGGSGGGGSQTVVTQEPSLTVSPGGTVTLTCRSSTGAVTSGYYPNWVQQKPGQAPRGLIGATDMRPSGTPARFSGSLLGGKAALTLSGVQPEDEAEYYCALWYSNRWVFGGGTKLTVL

SEQ ID NO: 74 - protein, 14 aa, Artificial Sequence
  Synthetic peptide
GSSTGAVTSGYYPN

SEQ ID NO: 75 - protein, 7 aa, Artificial Sequence
  Synthetic peptide
GTKFLAP

SEQ ID NO: 76 - protein, 9 aa, Artificial Sequence
  Synthetic peptide
ALWYSNRWV

SEQ ID NO: 77 - protein, 5 aa, Artificial Sequence
  Synthetic peptide
VYAMN

SEQ ID NO: 78 - protein, 19 aa, Artificial Sequence
  Synthetic peptide
RIRSKYNNYATYYADSVKK

SEQ ID NO: 79 - protein, 14 aa, Artificial Sequence
  Synthetic peptide
HGNFGNSYISWWAY

SEQ ID NO: 80 - protein, 125 aa, Artificial Sequence
  Synthetic peptide
EVQLVESGGGLVQPGGSLKLSCAASGFTFNVYAMNWVRQAPGKGLEWVARIRSKYNNYATYYADSVKKRFTISRDDSKNTAYLQMNNLKTEDTAVYYCVRHGNFGNSYISWWAYWGQGTLVTVSS

SEQ ID NO: 81 - protein, 109 aa, Artificial Sequence; identical to SEQ ID NO: 18
  Synthetic peptide

SEQ ID NO: 82 - protein, 249 aa, Artificial Sequence
  Synthetic peptide
EVQLVESGGGLVQPGGSLKLSCAASGFTFNVYAMNWVRQAPGKGLEWVARIRSKYNNYATYYADSVKKRFTISRDDSKNTAYLQMNNLKTEDTAVYYCVRHGNFGNSYISWWAYWGQGTLVTVSSGGGGSGGGGSGGGGSQTVVTQEPSLTVSPGGTVTLTCGSSTGAVTSGYYPNWVQQKPGQAPRGLIGGTKFLAPGTPARFSGSLLGGKAALTLSGVQPEDEAEYYCALWYSNRWVFGGGTKLTVL

SEQ ID NO: 83 - protein, 14 aa, Artificial Sequence
  Synthetic peptide
GSSTGAVTSGNYPN

SEQ ID NO: 84 - protein, 7 aa, Artificial Sequence
  Synthetic peptide
GTKFLAP

SEQ ID NO: 85 - protein, 9 aa, Artificial Sequence
  Synthetic peptide
VLWYSNRWV

SEQ ID NO: 86 - protein, 5 aa, Artificial Sequence
  Synthetic peptide
SYAMN

SEQ ID NO: 87 - protein, 19 aa, Artificial Sequence
  Synthetic peptide
RIRSKYNNYATYYADSVKG

SEQ ID NO: 88 - protein, 14 aa, Artificial Sequence
  Synthetic peptide
HGNFGNSYVSWWAY

SEQ ID NO: 89 - protein, 125 aa, Artificial Sequence
  Synthetic peptide
EVQLVESGGGLVQPGGSLKLSCAASGFTFNSYAMNWVRQAPGKGLEWVARIRSKYNNYATYYADSVKGRFTISRDDSKNTAYLQMNNLKTEDTAVYYCVRHGNFGNSYVSWWAYWGQGTLVTVSS

SEQ ID NO: 90 - protein, 109 aa, Artificial Sequence
  Synthetic peptide
QTVVTQEPSLTVSPGGTVTLTCGSSTGAVTSGNYPNWVQQKPGQAPRGLIGGTKFLAPGTPARFSGSLLGGKAALTLSGVQPEDEAEYYCVLWYSNRWVFGGGTKLTVL

SEQ ID NO: 91 - protein, 249 aa, Artificial Sequence
  Synthetic peptide
EVQLVESGGGLVQPGGSLKLSCAASGFTFNSYAMNWVRQAPGKGLEWVARIRSKYNNYATYYADSVKGRFTISRDDSKNTAYLQMNNLKTEDTAVYYCVRHGNFGNSYVSWWAYWGQGTLVTVSSGGGGSGGGGSGGGGSQTVVTQEPSLTVSPGGTVTLTCGSSTGAVTSGNYPNWVQQKPGQAPRGLIGGTKFLAPGTPARFSGSLLGGKAALTLSGVQPEDEAEYYCVLWYSNRWVFGGGTKLTVL

SEQ ID NO: 92 - protein, 14 aa, Artificial Sequence
  Synthetic peptide
GSSTGAVTSGNYPN

SEQ ID NO: 93 - protein, 7 aa, Artificial Sequence
  Synthetic peptide
GTKFLAP

SEQ ID NO: 94 - protein, 9 aa, Artificial Sequence
  Synthetic peptide
VLWYSNRWV

SEQ ID NO: 95 - protein, 5 aa, Artificial Sequence
  Synthetic peptide
KYAMN

SEQ ID NO: 96 - protein, 19 aa, Artificial Sequence
  Synthetic peptide
RIRSKYNNYATYYADSVKD

SEQ ID NO: 97 - protein, 14 aa, Artificial Sequence
  Synthetic peptide
HGNFGNSYISYWAY

SEQ ID NO: 98 - protein, 125 aa, Artificial Sequence; identical to SEQ ID NO: 26
  Synthetic peptide

SEQ ID NO: 99 - protein, 109 aa, Artificial Sequence; identical to SEQ ID NO: 90
  Synthetic peptide

SEQ ID NO: 100 - protein, 249 aa, Artificial Sequence
  Synthetic peptide
EVQLVESGGGLVQPGGSLKLSCAASGFTFNKYAMNWVRQAPGKGLEWVARIRSKYNNYATYYADSVKDRFTISRDDSKNTAYLQMNNLKTEDTAVYYCVRHGNFGNSYISYWAYWGQGTLVTVSSGGGGSGGGGSGGGGSQTVVTQEPSLTVSPGGTVTLTCGSSTGAVTSGNYPNWVQQKPGQAPRGLIGGTKFLAPGTPARFSGSLLGGKAALTLSGVQPEDEAEYYCVLWYSNRWVFGGGTKLTVL

SEQ ID NO: 101 - protein, 125 aa, Artificial Sequence
  Synthetic peptide
EVQLVESGGGLVQPGGSLRLSCAASGFTFNSYAMNWVRQAPGKGLEWVARIRSKYNNYATYYADSVKGRFTISRDDSKNTAYLQMNSLKTEDTAVYYCVRHGNFGNSYVSWWAYWGQGTLVTVSS

SEQ ID NO: 102 - protein, 109 aa, Artificial Sequence; identical to SEQ ID NO: 90
  Synthetic peptide

SEQ ID NO: 103 - protein, 249 aa, Artificial Sequence
  Synthetic peptide
EVQLVESGGGLVQPGGSLRLSCAASGFTFNSYAMNWVRQAPGKGLEWVARIRSKYNNYATYYADSVKGRFTISRDDSKNTAYLQMNSLKTEDTAVYYCVRHGNFGNSYVSWWAYWGQGTLVTVSSGGGGSGGGGSGGGGSQTVVTQEPSLTVSPGGTVTLTCGSSTGAVTSGNYPNWVQQKPGQAPRGLIGGTKFLAPGTPARFSGSLLGGKAALTLSGVQPEDEAEYYCVLWYSNRWVFGGGTKLTVL

SEQ ID NO: 104 - protein, 585 aa, Homo sapiens [sequence omitted]

SEQ ID NO: 105 - protein, 585 aa, Artificial Sequence
  Synthetic peptide
DAHKSEVAHRFKDLGEENFKALVLIAFAQYLQQCPFEDHVKLVNEVTEFAKTCVADESAENCDKSLHTLFGDKLCTVATLRETYGEMADCCAKQEPERNECFLQHKDDNPNLPRLVRPEVDVMCTAFHDNEETFLKKYLYEIARRHPYFYAPELLFFAKRYKAAFTECCQAADKAACLLPKLDELRDEGKASSAKQRLKCASLQKFGERAFKAWAVARLSQRFPKAEFAEVSKLVTDLTKVHTECCHGDLLECADDRADLAKYICENQDSISSKLKECCEKPLLEKSHCIAEVENDEMPADLPSLAADFVESKDVCKNYAEAKDVFLGMFLYEYARRHPDYSVVLLLRLAKTYETTLEKCCAAADPHECYAKVFDEFKPLVEEPQNLIKQNCELFEQLGEYKFQNALLVRYTKKVPQVSTPTLVEVSRNLGKVGSKCCKHPEAKRMPCAEDYLSVVLNQLCVLHEKTPVSDRVTKCCTESLVNRRPCFSALEVDETYVPKEFNAGTFTFHADICTLSEKERQIKKQTALVELVKHKPKATKEQLKAAMDDFAAFVEKCCKADDKETCFAEEGKKLVAASQAALGL

SEQ ID NO: 106 - protein, 585 aa, Artificial Sequence
  Synthetic peptide
DAHKSEVAHRFKDLGEENFKALVLIAFAQYLQQCPFEDHVKLVNEVTEFAKTCVADESAENCDKSLHTLFGDKLCTVATLRETYGEMADCCAKQEPERNECFLQHKDDNPNLPRLVRPEVDVMCTAFHDNEETFLKKYLYEIARRHPYFYAPELLFFAKRYKAAFTECCQAADKAACLLPKLDELRDEGKASSAKQRLKCASLQKFGERAFKAWAVARLSQRFPKAEFAEVSKLVTDLTKVHTECCHGDLLECADDRADLAKYICENQDSISSKLKECCEKPLLEKSHCIAEVENDEMPADLPSLAADFVESKDVCKNYAEAKDVFLGMFLYEYARRHPDYSVVLLLRLAKTYETTLEKCCAAADPHECYAKVFDEFKPLVEEPQNLIKQNCELFEQLGEYKFQNALLVRYTKKVPQVSTPTLVEVSRNLGKVGSKCCKHPEAKRMPCAEDYLSVVLNQLCVLHEKTPVSDRVTKCCTESLVNRRPCFSALEVDETYVPKEFNAETFTFHADICTLSEKERQIKKQTALVELVKHKPKATKEQLKAVMDDFAAFVEKCCKADDKETCFAEEGPKLVAASQAALGL

SEQ ID NO: 107 - protein, 585 aa, Artificial Sequence
  Synthetic peptide
DAHKSEVAHRFKDLGEENFKALVLIAFAQYLQQCPFEDHVKLVNEVTEFAKTCVADESAENCDKSLHTLFGDKLCTVATLRETYGEMADCCAKQEPERNECFLQHKDDNPNLPRLVRPEVDVMCTAFHDNEETFLKKYLYEIARRHPYFYAPELLFFAKRYKAAFTECCQAADKAACLLPKLDELRDEGKASSAKQRLKCASLQKFGERAFKAWAVARLSQRFPKAEFAEVSKLVTDLTKVHTECCHGDLLECADDRADLAKYICENQDSISSKLKECCEKPLLEKSHCIAEVENDEMPADLPSLAADFVESKDVCKNYAEAKDVFLGMFLYEYARRHPDYSVVLLLRLAKTYETTLEKCCAAADPHECYAKVFDEFKPLVEEPQNLIKQNCELFEQLGEYKFQNALLVRYTKKVPQVSTPTLVEVSRNLGKVGSKCCKHPEAKRMPCAEDYLSVVLNQLCVLHEKTPVSDRVTKCCTESLVNRRPCFSALDVDETYVPKEFNAETFTFHADICTLSEKERQIKKQTALVELVKHKPKATKEQLKAVMDDFAAFVEKCCKADDKETCFAEEGPHLVAASKAALGL

SEQ ID NO: 108 - protein, 585 aa, Artificial Sequence
  Synthetic peptide
DAHKSEVAHRFKDLGEENFKALVLIAFAQYLQQCPFEDHVKLVNEVTEFAKTCVADESAENCDKSLHTLFGDKLCTVATLRETYGEMADCCAKQEPERNECFLQHKDDNPNLPRLVRPEVDVMCTAFHDNEETFLKKYLYEIARRHPYFYAPELLFFAKRYKAAFTECCQAADKAACLLPKLDELRDEGKASSAKQRLKCASLQKFGERAFKAWAVARLSQRFPKAEFAEVSKLVTDLTKVHTECCHGDLLECADDRADLAKYICENQDSISSKLKECCEKPLLEKSHCIAEVENDEMPADLPSLAADFVESKDVCKNYAEAKDVFLGMFLYEYARRHPDYSVVLLLRLAKTYETTLEKCCAAADPHECYAKVFDEFKPLVEEPQNLIKQNCELFEQLGEYKFQNALLVRYTKKVPQVSTPTLVEVSRNLGKVGSKCCKHPEAKRMPCAEDYLSVVLNQLCVLHEKTPVSDRVTKCCTESLVNRRPCFSALGVDETYVPKEFNAETFTFHADICTLSEKERQIKKQTALVELVKHKPKATKEQLKAVMDKFAAFVEKCCKADDKETCFAEEGPKLVAASQAALGL

SEQ ID NO: 109 - protein, 585 aa, Artificial Sequence
  Synthetic peptide
DAHKSEVAHRFKDLGEENFKALVLIAFAQYLQQCPFEDHVKLVNEVTEFAKTCVADESAENCDKSLHTLFGDKLCTVATLRETYGEMADCCAKQEPERNECFLQHKDDNPNLPRLVRPEVDVMCTAFHDNEETFLKKYLYEIARRHPYFYAPELLFFAKRYKAAFTECCQAADKAACLLPKLDELRDEGKASSAKQRLKCASLQKFGERAFKAWAVARLSQRFPKAEFAEVSKLVTDLTKVHTECCHGDLLECADDRADLAKYICENQDSISSKLKECCEKPLLEKSHCIAEVENDEMPADLPSLAADFVESKDVCKNYAEAKDVFLGMFLYEYARRHPDYSVVLLLRLAKTYETTLEKCCAAADPHECYAKVFDEFKPLVEEPQNLIKQNCELFEQLGEYKFQNALLVRYTKKVPQVSTPTLVEVSRNLGKVGSKCCKHPEAKRMPCAEDYLSVVLNQLCVLHEKTPVSDRVTKCCTESLVNRRPCFSALDVDETYVPKEFNAETFTFHADICTLSEKERQIKKQTALVELVKHKPKATKEQLKAVMDKFAAFVEKCCKADDKETCFAEEGPKLVAASQAALGL

SEQ ID NO: 110 - protein, 585 aa, Artificial Sequence
  Synthetic peptide
DAHKSEVAHRFKDLGEENFKALVLIAFAQYLQQCPFEDHVKLVNEVTEFAKTCVADESAENCDKSLHTLFGDKLCTVATLRETYGEMADCCAKQEPERNECFLQHKDDNPNLPRLVRPEVDVMCTAFHDNEETFLKKYLYEIARRHPYFYAPELLFFAKRYKAAFTECCQAADKAACLLPKLDELRDEGKASSAKQRLKCASLQKFGERAFKAWAVARLSQRFPKAEFAEVSKLVTDLTKVHTECCHGDLLECADDRADLAKYICENQDSISSKLKECCEKPLLEKSHCIAEVENDEMPADLPSLAADFVESKDVCKNYAEAKDVFLGMFLYEYARRHPDYSVVLLLRLAKTYETTLEKCCAAADPHECYAKVFDEFKPLVEEPQNLIKQNCELFEQLGEYKFQNALLVRYTKKVPQVSTPTLVEVSRNLGKVGSKCCKHPEAKRMPCAEDYLSVVLNQLCVLHEKTPVSDRVTKCCTESLVNRRPCFSALEVDETYVPKEFNAETFTFHADICTLSEKERQIKKQTALVELVKHKPKATKEQLKAVMDKFAAFVEKCCKADDKETCFAEEGPHLVAASQAALGL

SEQ ID NO: 111 - protein, 585 aa, Artificial Sequence
  Synthetic peptide
DAHKSEVAHRFKDLGEENFKALVLIAFAQYLQQCPFEDHVKLVNEVTEFAKTCVADESAENCDKSLHTLFGDKLCTVATLRETYGEMADCCAKQEPERNECFLQHKDDNPNLPRLVRPEVDVMCTAFHDNEETFLKKYLYEIARRHPYFYAPELLFFAKRYKAAFTECCQAADKAACLLPKLDELRDEGKASSAKQRLKCASLQKFGERAFKAWAVARLSQRFPKAEFAEVSKLVTDLTKVHTECCHGDLLECADDRADLAKYICENQDSISSKLKECCEKPLLEKSHCIAEVENDEMPADLPSLAADFVESKDVCKNYAEAKDVFLGMFLYEYARRHPDYSVVLLLRLAKTYETTLEKCCAAADPHECYAKVFDEFKPLVEEPQNLIKQNCELFEQLGEYKFQNALLVRYTKKVPQVSTPTLVEVSRNLGKVGSKCCKHPEAKRMPCAEDYLSVVLNQLCVLHEKTPVSDRVTKCCTESLVNRRPCFSALEVDETYVPKEFNAETFTFHADICTLSEKERQIKKQTALVELVKHKPKATKEQLKAVMDDFAAFVEKCCKADDKETCFAEEGPHLVAASKAALGL

SEQ ID NO: 112 - protein, 585 aa, Artificial Sequence
  Synthetic peptide
DAHKSEVAHRFKDLGEENFKALVLIAFAQYLQQCPFEDHVKLVNEVTEFAKTCVADESAENCDKSLHTLFGDKLCTVATLRETYGEMADCCAKQEPERNECFLQHKDDNPNLPRLVRPEVDVMCTAFHDNEETFLKKYLYEIARRHPYFYAPELLFFAKRYKAAFTECCQAADKAACLLPKLDELRDEGKASSAKQRLKCASLQKFGERAFKAWAVARLSQRFPKAEFAEVSKLVTDLTKVHTECCHGDLLECADDRADLAKYICENQDSISSKLKECCEKPLLEKSHCIAEVENDEMPADLPSLAADFVESKDVCKNYAEAKDVFLGMFLYEYARRHPDYSVVLLLRLAKTYETTLEKCCAAADPHECYAKVFDEFKPLVEEPQNLIKQNCELFEQLGEYKFQNALLVRYTKKVPQVSTPTLVEVSRNLGKVGSKCCKHPEAKRMPCAEDYLSVVLNQLCVLHEKTPVSDRVTKCCTESLVNRRPCFSALEVDETYVPKEFNAETFTFHADICTLSEKERQIKKQTALVELVKHKPKATKEQLKAVMDKFAAFVEKCCKADDKETCFAEEGPKLVAASKAALGL

SEQ ID NO: 113 - protein, 585 aa, Artificial Sequence
  Synthetic peptide
DAHKSEVAHRFKDLGEENFKALVLIAFAQYLQQCPFEDHVKLVNEVTEFAKTCVADESAENCDKSLHTLFGDKLCTVATLRETYGEMADCCAKQEPERNECFLQHKDDNPNLPRLVRPEVDVMCTAFHDNEETFLKKYLYEIARRHPYFYAPELLFFAKRYKAAFTECCQAADKAACLLPKLDELRDEGKASSAKQRLKCASLQKFGERAFKAWAVARLSQRFPKAEFAEVSKLVTDLTKVHTECCHGDLLECADDRADLAKYICENQDSISSKLKECCEKPLLEKSHCIAEVENDEMPADLPSLAADFVESKDVCKNYAEAKDVFLGMFLYEYARRHPDYSVVLLLRLAKTYETTLEKCCAAADPHECYAKVFDEFKPLVEEPQNLIKQNCELFEQLGEYKFQNALLVRYTKKVPQVSTPTLVEVSRNLGKVGSKCCKHPEAKRMPCAEDYLSVVLNQLCVLHEKTPVSDRVTKCCTESLVNRRPCFSALDVDETYVPKEFNAETFTFHADICTLSEKERQIKKQTALVELVKHKPKATKEQLKAVMDDFAAFVEKCCKADDKETCFAEEGPKLVAASKAALGL

SEQ ID NO: 114 - protein, 585 aa, Artificial Sequence
  Synthetic peptide
DAHKSEVAHRFKDLGEENFKALVLIAFAQYLQQSPFEDHVKLVNEVTEFAKTCVADESAENCDKSLHTLFGDKLCTVATLRETYGEMADCCAKQEPERNECFLQHKDDNPNLPRLVRPEVDVMCTAFHDNEETFLKKYLYEIARRHPYFYAPELLFFAKRYKAAFTECCQAADKAACLLPKLDELRDEGKASSAKQRLKCASLQKFGERAFKAWAVARLSQRFPKAEFAEVSKLVTDLTKVHTECCHGDLLECADDRADLAKYICENQDSISSKLKECCEKPLLEKSHCIAEVENDEMPADLPSLAADFVESKDVCKNYAEAKDVFLGMFLYEYARRHPDYSVVLLLRLAKTYETTLEKCCAAADPHECYAKVFDEFKPLVEEPQNLIKQNCELFEQLGEYKFQNALLVRYTKKVPQVSTPTLVEVSRNLGKVGSKCCKHPEAKRMPCAEDYLSVVLNQLCVLHEKTPVSDRVTKCCTESLVNRRPCFSALEVDETYVPKEFNAETFTFHADICTLSEKERQIKKQTALVELVKHKPKATKEQLKAVMDDFAAFVEKCCKADDKETCFAEEGKKLVAASQAALGL

SEQ ID NO: 115 - protein, 585 aa, Artificial Sequence
  Synthetic peptide
DAHKSEVAHRFKDLGEENFKALVLIAFAQYLQQSPFEDHVKLVNEVTEFAKTCVADESAENCDKSLHTLFGDKLCTVATLRETYGEMADCCAKQEPERNECFLQHKDDNPNLPRLVRPEVDVMCTAFHDNEETFLKKYLYEIARRHPYFYAPELLFFAKRYKAAFTECCQAADKAACLLPKLDELRDEGKASSAKQRLKCASLQKFGERAFKAWAVARLSQRFPKAEFAEVSKLVTDLTKVHTECCHGDLLECADDRADLAKYICENQDSISSKLKECCEKPLLEKSHCIAEVENDEMPADLPSLAADFVESKDVCKNYAEAKDVFLGMFLYEYARRHPDYSVVLLLRLAKTYETTLEKCCAAADPHECYAKVFDEFKPLVEEPQNLIKQNCELFEQLGEYKFQNALLVRYTKKVPQVSTPTLVEVSRNLGKVGSKCCKHPEAKRMPCAEDYLSVVLNQLCVLHEKTPVSDRVTKCCTESLVNRRPCFSALEVDETYVPKEFNAGTFTFHADICTLSEKERQIKKQTALVELVKHKPKATKEQLKAAMDDFAAFVEKCCKADDKETCFAEEGKKLVAASQAALGL

SEQ ID NO: 116 - protein, 585 aa, Artificial Sequence
  Synthetic peptide
DAHKSEVAHRFKDLGEENFKALVLIAFAQYLQQSPFEDHVKLVNEVTEFAKTCVADESAENCDKSLHTLFGDKLCTVATLRETYGEMADCCAKQEPERNECFLQHKDDNPNLPRLVRPEVDVMCTAFHDNEETFLKKYLYEIARRHPYFYAPELLFFAKRYKAAFTECCQAADKAACLLPKLDELRDEGKASSAKQRLKCASLQKFGERAFKAWAVARLSQRFPKAEFAEVSKLVTDLTKVHTECCHGDLLECADDRADLAKYICENQDSISSKLKECCEKPLLEKSHCIAEVENDEMPADLPSLAADFVESKDVCKNYAEAKDVFLGMFLYEYARRHPDYSVVLLLRLAKTYETTLEKCCAAADPHECYAKVFDEFKPLVEEPQNLIKQNCELFEQLGEYKFQNALLVRYTKKVPQVSTPTLVEVSRNLGKVGSKCCKHPEAKRMPCAEDYLSVVLNQLCVLHEKTPVSDRVTKCCTESLVNRRPCFSALEVDETYVPKEFNAETFTFHADICTLSEKERQIKKQTALVELVKHKPKATKEQLKAVMDDFAAFVEKCCKADDKETCFAEEGPKLVAASQAALGL

SEQ ID NO: 117 - protein, 585 aa, Artificial Sequence
  Synthetic peptide
DAHKSEVAHRFKDLGEENFKALVLIAFAQYLQQSPFEDHVKLVNEVTEFAKTCVADESAENCDKSLHTLFGDKLCTVATLRETYGEMADCCAKQEPERNECFLQHKDDNPNLPRLVRPEVDVMCTAFHDNEETFLKKYLYEIARRHPYFYAPELLFFAKRYKAAFTECCQAADKAACLLPKLDELRDEGKASSAKQRLKCASLQKFGERAFKAWAVARLSQRFPKAEFAEVSKLVTDLTKVHTECCHGDLLECADDRADLAKYICENQDSISSKLKECCEKPLLEKSHCIAEVENDEMPADLPSLAADFVESKDVCKNYAEAKDVFLGMFLYEYARRHPDYSVVLLLRLAKTYETTLEKCCAAADPHECYAKVFDEFKPLVEEPQNLIKQNCELFEQLGEYKFQNALLVRYTKKVPQVSTPTLVEVSRNLGKVGSKCCKHPEAKRMPCAEDYLSVVLNQLCVLHEKTPVSDRVTKCCTESLVNRRPCFSALDVDETYVPKEFNAETFTFHADICTLSEKERQIKKQTALVELVKHKPKATKEQLKAVMDDFAAFVEKCCKADDKETCFAEEGPHLVAASKAALGL

SEQ ID NO: 118 - protein, 585 aa, Artificial Sequence
  Synthetic peptide
DAHKSEVAHRFKDLGEENFKALVLIAFAQYLQQSPFEDHVKLVNEVTEFAKTCVADESAENCDKSLHTLFGDKLCTVATLRETYGEMADCCAKQEPERNECFLQHKDDNPNLPRLVRPEVDVMCTAFHDNEETFLKKYLYEIARRHPYFYAPELLFFAKRYKAAFTECCQAADKAACLLPKLDELRDEGKASSAKQRLKCASLQKFGERAFKAWAVARLSQRFPKAEFAEVSKLVTDLTKVHTECCHGDLLECADDRADLAKYICENQDSISSKLKECCEKPLLEKSHCIAEVENDEMPADLPSLAADFVESKDVCKNYAEAKDVFLGMFLYEYARRHPDYSVVLLLRLAKTYETTLEKCCAAADPHECYAKVFDEFKPLVEEPQNLIKQNCELFEQLGEYKFQNALLVRYTKKVPQVSTPTLVEVSRNLGKVGSKCCKHPEAKRMPCAEDYLSVVLNQLCVLHEKTPVSDRVTKCCTESLVNRRPCFSALGVDETYVPKEFNAETFTFHADICTLSEKERQIKKQTALVELVKHKPKATKEQLKAVMDKFAAFVEKCCKADDKETCFAEEGPKLVAASQAALGL

SEQ ID NO: 119 - protein, 585 aa, Artificial Sequence
  Synthetic peptide
DAHKSEVAHRFKDLGEENFKALVLIAFAQYLQQSPFEDHVKLVNEVTEFAKTCVADESAENCDKSLHTLFGDKLCTVATLRETYGEMADCCAKQEPERNECFLQHKDDNPNLPRLVRPEVDVMCTAFHDNEETFLKKYLYEIARRHPYFYAPELLFFAKRYKAAFTECCQAADKAACLLPKLDELRDEGKASSAKQRLKCASLQKFGERAFKAWAVARLSQRFPKAEFAEVSKLVTDLTKVHTECCHGDLLECADDRADLAKYICENQDSISSKLKECCEKPLLEKSHCIAEVENDEMPADLPSLAADFVESKDVCKNYAEAKDVFLGMFLYEYARRHPDYSVVLLLRLAKTYETTLEKCCAAADPHECYAKVFDEFKPLVEEPQNLIKQNCELFEQLGEYKFQNALLVRYTKKVPQVSTPTLVEVSRNLGKVGSKCCKHPEAKRMPCAEDYLSVVLNQLCVLHEKTPVSDRVTKCCTESLVNRRPCFSALDVDETYVPKEFNAETFTFHADICTLSEKERQIKKQTALVELVKHKPKATKEQLKAVMDKFAAFVEKCCKADDKETCFAEEGPKLVAASQAALGL

SEQ ID NO: 120 - protein, 585 aa, Artificial Sequence
  Synthetic peptide
DAHKSEVAHRFKDLGEENFKALVLIAFAQYLQQSPFEDHVKLVNEVTEFAKTCVADESAENCDKSLHTLFGDKLCTVATLRETYGEMADCCAKQEPERNECFLQHKDDNPNLPRLVRPEVDVMCTAFHDNEETFLKKYLYEIARRHPYFYAPELLFFAKRYKAAFTECCQAADKAACLLPKLDELRDEGKASSAKQRLKCASLQKFGERAFKAWAVARLSQRFPKAEFAEVSKLVTDLTKVHTECCHGDLLECADDRADLAKYICENQDSISSKLKECCEKPLLEKSHCIAEVENDEMPADLPSLAADFVESKDVCKNYAEAKDVFLGMFLYEYARRHPDYSVVLLLRLAKTYETTLEKCCAAADPHECYAKVFDEFKPLVEEPQNLIKQNCELFEQLGEYKFQNALLVRYTKKVPQVSTPTLVEVSRNLGKVGSKCCKHPEAKRMPCAEDYLSVVLNQLCVLHEKTPVSDRVTKCCTESLVNRRPCFSALEVDETYVPKEFNAETFTFHADICTLSEKERQIKKQTALVELVKHKPKATKEQLKAVMDKFAAFVEKCCKADDKETCFAEEGPHLVAASQAALGL

SEQ ID NO: 121 - protein, 585 aa, Artificial Sequence
  Synthetic peptide
DAHKSEVAHRFKDLGEENFKALVLIAFAQYLQQSPFEDHVKLVNEVTEFAKTCVADESAENCDKSLHTLFGDKLCTVATLRETYGEMADCCAKQEPERNECFLQHKDDNPNLPRLVRPEVDVMCTAFHDNEETFLKKYLYEIARRHPYFYAPELLFFAKRYKAAFTECCQAADKAACLLPKLDELRDEGKASSAKQRLKCASLQKFGERAFKAWAVARLSQRFPKAEFAEVSKLVTDLTKVHTECCHGDLLECADDRADLAKYICENQDSISSKLKECCEKPLLEKSHCIAEVENDEMPADLPSLAADFVESKDVCKNYAEAKDVFLGMFLYEYARRHPDYSVVLLLRLAKTYETTLEKCCAAADPHECYAKVFDEFKPLVEEPQNLIKQNCELFEQLGEYKFQNALLVRYTKKVPQVSTPTLVEVSRNLGKVGSKCCKHPEAKRMPCAEDYLSVVLNQLCVLHEKTPVSDRVTKCCTESLVNRRPCFSALEVDETYVPKEFNAETFTFHADICTLSEKERQIKKQTALVELVKHKPKATKEQLKAVMDDFAAFVEKCCKADDKETCFAEEGPHLVAASKAALGL

SEQ ID NO: 122 - protein, 585 aa, Artificial Sequence
  Synthetic peptide
DAHKSEVAHRFKDLGEENFKALVLIAFAQYLQQSPFEDHVKLVNEVTEFAKTCVADESAENCDKSLHTLFGDKLCTVATLRETYGEMADCCAKQEPERNECFLQHKDDNPNLPRLVRPEVDVMCTAFHDNEETFLKKYLYEIARRHPYFYAPELLFFAKRYKAAFTECCQAADKAACLLPKLDELRDEGKASSAKQRLKCASLQKFGERAFKAWAVARLSQRFPKAEFAEVSKLVTDLTKVHTECCHGDLLECADDRADLAKYICENQDSISSKLKECCEKPLLEKSHCIAEVENDEMPADLPSLAADFVESKDVCKNYAEAKDVFLGMFLYEYARRHPDYSVVLLLRLAKTYETTLEKCCAAADPHECYAKVFDEFKPLVEEPQNLIKQNCELFEQLGEYKFQNALLVRYTKKVPQVSTPTLVEVSRNLGKVGSKCCKHPEAKRMPCAEDYLSVVLNQLCVLHEKTPVSDRVTKCCTESLVNRRPCFSALEVDETYVPKEFNAETFTFHADICTLSEKERQIKKQTALVELVKHKPKATKEQLKAVMDKFAAFVEKCCKADDKETCFAEEGPKLVAASKAALGL

SEQ ID NO: 123 - protein, 585 aa, Artificial Sequence
  Synthetic peptide
DAHKSEVAHRFKDLGEENFKALVLIAFAQYLQQSPFEDHVKLVNEVTEFAKTCVADESAENCDKSLHTLFGDKLCTVATLRETYGEMADCCAKQEPERNECFLQHKDDNPNLPRLVRPEVDVMCTAFHDNEETFLKKYLYEIARRHPYFYAPELLFFAKRYKAAFTECCQAADKAACLLPKLDELRDEGKASSAKQRLKCASLQKFGERAFKAWAVARLSQRFPKAEFAEVSKLVTDLTKVHTECCHGDLLECADDRADLAKYICENQDSISSKLKECCEKPLLEKSHCIAEVENDEMPADLPSLAADFVESKDVCKNYAEAKDVFLGMFLYEYARRHPDYSVVLLLRLAKTYETTLEKCCAAADPHECYAKVFDEFKPLVEEPQNLIKQNCELFEQLGEYKFQNALLVRYTKKVPQVSTPTLVEVSRNLGKVGSKCCKHPEAKRMPCAEDYLSVVLNQLCVLHEKTPVSDRVTKCCTESLVNRRPCFSALDVDETYVPKEFNAETFTFHADICTLSEKERQIKKQTALVELVKHKPKATKEQLKAVMDDFAAFVEKCCKADDKETCFAEEGPKLVAASKAALGL

SEQ ID NO: 124 - protein, 585 aa, Artificial Sequence
  Synthetic peptide
DAHKSEVAHRFKDLGEENFKALVLIAFAQYLQQAPFEDHVKLVNEVTEFAKTCVADESAENCDKSLHTLFGDKLCTVATLRETYGEMADCCAKQEPERNECFLQHKDDNPNLPRLVRPEVDVMCTAFHDNEETFLKKYLYEIARRHPYFYAPELLFFAKRYKAAFTECCQAADKAACLLPKLDELRDEGKASSAKQRLKCASLQKFGERAFKAWAVARLSQRFPKAEFAEVSKLVTDLTKVHTECCHGDLLECADDRADLAKYICENQDSISSKLKECCEKPLLEKSHCIAEVENDEMPADLPSLAADFVESKDVCKNYAEAKDVFLGMFLYEYARRHPDYSVVLLLRLAKTYETTLEKCCAAADPHECYAKVFDEFKPLVEEPQNLIKQNCELFEQLGEYKFQNALLVRYTKKVPQVSTPTLVEVSRNLGKVGSKCCKHPEAKRMPCAEDYLSVVLNQLCVLHEKTPVSDRVTKCCTESLVNRRPCFSALEVDETYVPKEFNAETFTFHADICTLSEKERQIKKQTALVELVKHKPKATKEQLKAVMDDFAAFVEKCCKADDKETCFAEEGKKLVAASQAALGL

SEQ ID NO: 125 - protein, 585 aa, Artificial Sequence
  Synthetic peptide
DAHKSEVAHRFKDLGEENFKALVLIAFAQYLQQAPFEDHVKLVNEVTEFAKTCVADESAENCDKSLHTLFGDKLCTVATLRETYGEMADCCAKQEPERNECFLQHKDDNPNLPRLVRPEVDVMCTAFHDNEETFLKKYLYEIARRHPYFYAPELLFFAKRYKAAFTECCQAADKAACLLPKLDELRDEGKASSAKQRLKCASLQKFGERAFKAWAVARLSQRFPKAEFAEVSKLVTDLTKVHTECCHGDLLECADDRADLAKYICENQDSISSKLKECCEKPLLEKSHCIAEVENDEMPADLPSLAADFVESKDVCKNYAEAKDVFLGMFLYEYARRHPDYSVVLLLRLAKTYETTLEKCCAAADPHECYAKVFDEFKPLVEEPQNLIKQNCELFEQLGEYKFQNALLVRYTKKVPQVSTPTLVEVSRNLGKVGSKCCKHPEAKRMPCAEDYLSVVLNQLCVLHEKTPVSDRVTKCCTESLVNRRPCFSALEVDETYVPKEFNAGTFTFHADICTLSEKERQIKKQTALVELVKHKPKATKEQLKAAMDDFAAFVEKCCKADDKETCFAEEGKKLVAASQAALGL

SEQ ID NO: 126 - protein, 585 aa, Artificial Sequence
  Synthetic peptide
DAHKSEVAHRFKDLGEENFKALVLIAFAQYLQQAPFEDHVKLVNEVTEFAKTCVADESAENCDKSLHTLFGDKLCTVATLRETYGEMADCCAKQEPERNECFLQHKDDNPNLPRLVRPEVDVMCTAFHDNEETFLKKYLYEIARRHPYFYAPELLFFAKRYKAAFTECCQAADKAACLLPKLDELRDEGKASSAKQRLKCASLQKFGERAFKAWAVARLSQRFPKAEFAEVSKLVTDLTKVHTECCHGDLLECADDRADLAKYICENQDSISSKLKECCEKPLLEKSHCIAEVENDEMPADLPSLAADFVESKDVCKNYAEAKDVFLGMFLYEYARRHPDYSVVLLLRLAKTYETTLEKCCAAADPHECYAKVFDEFKPLVEEPQNLIKQNCELFEQLGEYKFQNALLVRYTKKVPQVSTPTLVEVSRNLGKVGSKCCKHPEAKRMPCAEDYLSVVLNQLCVLHEKTPVSDRVTKCCTESLVNRRPCFSALEVDETYVPKEFNAETFTFHADICTLSEKERQIKKQTALVELVKHKPKATKEQLKAVMDDFAAFVEKCCKADDKETCFAEEGPKLVAASQAALGL

SEQ ID NO: 127 - protein, 585 aa, Artificial Sequence
  Synthetic peptide
DAHKSEVAHRFKDLGEENFKALVLIAFAQYLQQAPFEDHVKLVNEVTEFAKTCVADESAENCDKSLHTLFGDKLCTVATLRETYGEMADCCAKQEPERNECFLQHKDDNPNLPRLVRPEVDVMCTAFHDNEETFLKKYLYEIARRHPYFYAPELLFFAKRYKAAFTECCQAADKAACLLPKLDELRDEGKASSAKQRLKCASLQKFGERAFKAWAVARLSQRFPKAEFAEVSKLVTDLTKVHTECCHGDLLECADDRADLAKYICENQDSISSKLKECCEKPLLEKSHCIAEVENDEMPADLPSLAADFVESKDVCKNYAEAKDVFLGMFLYEYARRHPDYSVVLLLRLAKTYETTLEKCCAAADPHECYAKVFDEFKPLVEEPQNLIKQNCELFEQLGEYKFQNALLVRYTKKVPQVSTPTLVEVSRNLGKVGSKCCKHPEAKRMPCAEDYLSVVLNQLCVLHEKTPVSDRVTKCCTESLVNRRPCFSALDVDETYVPKEFNAETFTFHADICTLSEKERQIKKQTALVELVKHKPKATKEQLKAVMDDFAAFVEKCCKADDKETCFAEEGPHLVAASKAALGL

SEQ ID NO: 128 - protein, 585 aa, Artificial Sequence
  Synthetic peptide
DAHKSEVAHRFKDLGEENFKALVLIAFAQYLQQAPFEDHVKLVNEVTEFAKTCVADESAENCDKSLHTLFGDKLCTVATLRETYGEMADCCAKQEPERNECFLQHKDDNPNLPRLVRPEVDVMCTAFHDNEETFLKKYLYEIARRHPYFYAPELLFFAKRYKAAFTECCQAADKAACLLPKLDELRDEGKASSAKQRLKCASLQKFGERAFKAWAVARLSQRFPKAEFAEVSKLVTDLTKVHTECCHGDLLECADDRADLAKYICENQDSISSKLKECCEKPLLEKSHCIAEVENDEMPADLPSLAADFVESKDVCKNYAEAKDVFLGMFLYEYARRHPDYSVVLLLRLAKTYETTLEKCCAAADPHECYAKVFDEFKPLVEEPQNLIKQNCELFEQLGEYKFQNALLVRYTKKVPQVSTPTLVEVSRNLGKVGSKCCKHPEAKRMPCAEDYLSVVLNQLCVLHEKTPVSDRVTKCCTESLVNRRPCFSALGVDETYVPKEFNAETFTFHADICTLSEKERQIKKQTALVELVKHKPKATKEQLKAVMDKFAAFVEKCCKADDKETCFAEEGPKLVAASQAALGL

SEQ ID NO: 129 - protein, 585 aa, Artificial Sequence
  Synthetic peptide
DAHKSEVAHRFKDLGEENFKALVLIAFAQYLQQAPFEDHVKLVNEVTEFAKTCVADESAENCDKSLHTLFGDKLCTVATLRETYGEMADCCAKQEPERNECFLQHKDDNPNLPRLVRPEVDVMCTAFHDNEETFLKKYLYEIARRHPYFYAPELLFFAKRYKAAFTECCQAADKAACLLPKLDELRDEGKASSAKQRLKCASLQKFGERAFKAWAVARLSQRFPKAEFAEVSKLVTDLTKVHTECCHGDLLECADDRADLAKYICENQDSISSKLKECCEKPLLEKSHCIAEVENDEMPADLPSLAADFVESKDVCKNYAEAKDVFLGMFLYEYARRHPDYSVVLLLRLAKTYETTLEKCCAAADPHECYAKVFDEFKPLVEEPQNLIKQNCELFEQLGEYKFQNALLVRYTKKVPQVSTPTLVEVSRNLGKVGSKCCKHPEAKRMPCAEDYLSVVLNQLCVLHEKTPVSDRVTKCCTESLVNRRPCFSALDVDETYVPKEFNAETFTFHADICTLSEKERQIKKQTALVELVKHKPKATKEQLKAVMDKFAAFVEKCCKADDKETCFAEEGPKLVAASQAALGL

SEQ ID NO: 130 - protein, 585 aa, Artificial Sequence
  Synthetic peptide
DAHKSEVAHRFKDLGEENFKALVLIAFAQYLQQAPFEDHVKLVNEVTEFAKTCVADESAENCDKSLHTLFGDKLCTVATLRETYGEMADCCAKQEPERNECFLQHKDDNPNLPRLVRPEVDVMCTAFHDNEETFLKKYLYEIARRHPYFYAPELLFFAKRYKAAFTECCQAADKAACLLPKLDELRDEGKASSAKQRLKCASLQKFGERAFKAWAVARLSQRFPKAEFAEVSKLVTDLTKVHTECCHGDLLECADDRADLAKYICENQDSISSKLKECCEKPLLEKSHCIAEVENDEMPADLPSLAADFVESKDVCKNYAEAKDVFLGMFLYEYARRHPDYSVVLLLRLAKTYETTLEKCCAAADPHECYAKVFDEFKPLVEEPQNLIKQNCELFEQLGEYKFQNALLVRYTKKVPQVSTPTLVEVSRNLGKVGSKCCKHPEAKRMPCAEDYLSVVLNQLCVLHEKTPVSDRVTKCCTESLVNRRPCFSALEVDETYVPKEFNAETFTFHADICTLSEKERQIKKQTALVELVKHKPKATKEQLKAVMDKFAAFVEKCCKADDKETCFAEEGPHLVAASQAALGL

SEQ ID NO: 131 - protein, 585 aa, Artificial Sequence
  Synthetic peptide
DAHKSEVAHRFKDLGEENFKALVLIAFAQYLQQAPFEDHVKLVNEVTEFAKTCVADESAENCDKSLHTLFGDKLCTVATLRETYGEMADCCAKQEPERNECFLQHKDDNPNLPRLVRPEVDVMCTAFHDNEETFLKKYLYEIARRHPYFYAPELLFFAKRYKAAFTECCQAADKAACLLPKLDELRDEGKASSAKQRLKCASLQKFGERAFKAWAVARLSQRFPKAEFAEVSKLVTDLTKVHTECCHGDLLECADDRADLAKYICENQDSISSKLKECCEKPLLEKSHCIAEVENDEMPADLPSLAADFVESKDVCKNYAEAKDVFLGMFLYEYARRHPDYSVVLLLRLAKTYETTLEKCCAAADPHECYAKVFDEFKPLVEEPQNLIKQNCELFEQLGEYKFQNALLVRYTKKVPQVSTPTLVEVSRNLGKVGSKCCKHPEAKRMPCAEDYLSVVLNQLCVLHEKTPVSDRVTKCCTESLVNRRPCFSALEVDETYVPKEFNAETFTFHADICTLSEKERQIKKQTALVELVKHKPKATKEQLKAVMDDFAAFVEKCCKADDKETCFAEEGPHLVAASKAALGL

SEQ ID NO: 132 - protein, 585 aa, Artificial Sequence
  Synthetic peptide
DAHKSEVAHRFKDLGEENFKALVLIAFAQYLQQAPFEDHVKLVNEVTEFAKTCVADESAENCDKSLHTLFGDKLCTVATLRETYGEMADCCAKQEPERNECFLQHKDDNPNLPRLVRPEVDVMCTAFHDNEETFLKKYLYEIARRHPYFYAPELLFFAKRYKAAFTECCQAADKAACLLPKLDELRDEGKASSAKQRLKCASLQKFGERAFKAWAVARLSQRFPKAEFAEVSKLVTDLTKVHTECCHGDLLECADDRADLAKYICENQDSISSKLKECCEKPLLEKSHCIAEVENDEMPADLPSLAADFVESKDVCKNYAEAKDVFLGMFLYEYARRHPDYSVVLLLRLAKTYETTLEKCCAAADPHECYAKVFDEFKPLVEEPQNLIKQNCELFEQLGEYKFQNALLVRYTKKVPQVSTPTLVEVSRNLGKVGSKCCKHPEAKRMPCAEDYLSVVLNQLCVLHEKTPVSDRVTKCCTESLVNRRPCFSALEVDETYVPKEFNAETFTFHADICTLSEKERQIKKQTALVELVKHKPKATKEQLKAVMDKFAAFVEKCCKADDKETCFAEEGPKLVAASKAALGL

SEQ ID NO: 133 - protein, 585 aa, Artificial Sequence
  Synthetic peptide
DAHKSEVAHRFKDLGEENFKALVLIAFAQYLQQAPFEDHVKLVNEVTEFAKTCVADESAENCDKSLHTLFGDKLCTVATLRETYGEMADCCAKQEPERNECFLQHKDDNPNLPRLVRPEVDVMCTAFHDNEETFLKKYLYEIARRHPYFYAPELLFFAKRYKAAFTECCQAADKAACLLPKLDELRDEGKASSAKQRLKCASLQKFGERAFKAWAVARLSQRFPKAEFAEVSKLVTDLTKVHTECCHGDLLECADDRADLAKYICENQDSISSKLKECCEKPLLEKSHCIAEVENDEMPADLPSLAADFVESKDVCKNYAEAKDVFLGMFLYEYARRHPDYSVVLLLRLAKTYETTLEKCCAAADPHECYAKVFDEFKPLVEEPQNLIKQNCELFEQLGEYKFQNALLVRYTKKVPQVSTPTLVEVSRNLGKVGSKCCKHPEAKRMPCAEDYLSVVLNQLCVLHEKTPVSDRVTKCCTESLVNRRPCFSALDVDETYVPKEFNAETFTFHADICTLSEKERQIKKQTALVELVKHKPKATKEQLKAVMDDFAAFVEKCCKADDKETCFAEEGPKLVAASKAALGL

SEQ ID NO: 134 - protein, 16 aa, Artificial Sequence
  Synthetic peptide
RDWDFDVFGGGTPVGG

SEQ ID NO: 135 - protein, 16 aa, Artificial Sequence
  Synthetic peptide
  misc_feature (12)..(12): Xaa can be any naturally occurring amino acid
QRFVTGHFGGLXPANG

SEQ ID NO: 136 - protein, 16 aa, Artificial Sequence
  Synthetic peptide
QRFVTGHFGGLYPANG

SEQ ID NO: 137 - protein, 16 aa, Artificial Sequence
  Synthetic peptide
QRFVTGHFGGLHPANG

SEQ ID NO: 138 - protein, 9 aa, Artificial Sequence
  Synthetic peptide
TGHFGGLHP

SEQ ID NO: 139 - protein, 16 aa, Artificial Sequence
  Synthetic peptide
QRFCTGHFGGLHPCNG

SEQ ID NO: 140 - protein, 330 aa, Artificial Sequence
  Synthetic peptide
ASTKGPSVFPLAPSSKSTSGGTAALGCLVKDYFPEPVTVSWNSGALTSGVHTFPAVLQSSGLYSLSSVVTVPSSSLGTQTYICNVNHKPSNTKVDKKVEPKSCDKTHTCPPCPAPELLGGPSVFLFPPKPKDTLMISRTPEVTCVVVDVSHEDPEVKFNWYVDGVEVHNAKTKPCEEQYGSTYRCVSVLTVLHQDWLNGKEYKCKVSNKALPAPIEKTISKAKGQPREPQVYTLPPSREEMTKNQVSLTCLVKGFYPSDIAVEWESNGQPENNYDTTPPVLDSDGSFFLYSDLTVDKSRWQQGNVFSCSVMHEALHNHYTQKSLSLSPGK

SEQ ID NO: 141 - protein, 333 aa, Artificial Sequence
  Synthetic peptide
GQPKAAPSVTLFPPSSEELQANKATLVCLISDFYPGAVTVAWKADSSPVKAGVETTTPSKQSNNKYAASSYLSLTPEQWKSHRSYSCQVTHEGSTVEKTVAPTECSDKTHTCPPCPAPELLGGPSVFLFPPKPKDTLMISRTPEVTCVVVDVSHEDPEVKFNWYVDGVEVHNAKTKPCEEQYGSTYRCVSVLTVLHQDWLNGKEYKCKVSNKALPAPIEKTISKAKGQPREPQVYTLPPSRKEMTKNQVSLTCLVKGFYPSDIAVEWESNGQPENNYKTTPPVLKSDGSFFLYSKLTVDKSRWQQGNVFSCSVMHEALHNHYTQKSLSLSPGK

SEQ ID NO: 142 - protein, 330 aa, Artificial Sequence
  Synthetic peptide
ASTKGPSVFPLAPCSRSTSESTAALGCLVKDYFPEPVTVSWNSGALTSGVHTFPAVLQSSGLYSLSSVVTVPSSNFGTQTYTCNVDHKPSNTKVDKTVEPKSSDKTHTCPPCPAPEAAGGPSVFLFPPKPKDTLMISRTPEVTCVVVDVSHEDPEVKFNWYVDGVEVHNAKTKPREEQYNSTYRVVSVLTVLHQDWLNGKEYKCKVSNKALPAPIEKTISKAKGQPREPQVYTLPPSREEMTKNQVSLTCLVKGFYPSDIAVEWESNGQPENNYDTTPPVLDSDGSFFLYSDLTVDKSRWQQGNVFSCSVMHEALHNHYTQKSLSLSPGK

SEQ ID NO: 143 - protein, 338 aa, Artificial Sequence
  Synthetic peptide
GQPKAAPSVTLFPPSSEELQANKATLVCLISDFYPGAVTVAWKADSSPVKAGVETTTPSKQSNNKYAASSYLSLTPEQWKSHRSYSCQVTHEGSTVEKTVAPTECSEPKSSDKTHTCPPCPAPEAAGGPSVFLFPPKPKDTLMISRTPEVTCVVVDVSHEDPEVKFNWYVDGVEVHNAKTKPREEQYNSTYRVVSVLTVLHQDWLNGKEYKCKVSNKALPAPIEKTISKAKGQPREPQVYTLPPSRKEMTKNQVSLTCLVKGFYPSDIAVEWESNGQPENNYKTTPPVLKSDGSFFLYSKLTVDKSRWQQGNVFSCSVMHEALHNHYTQKSLSLSPGK

SEQ ID NO: 144 - protein, 227 aa, Artificial Sequence
  Synthetic peptide
DKTHTCPPCPAPELLGGPSVFLFPPKPKDTLMISRTPEVTCVVVDVSHEDPEVKFNWYVDGVEVHNAKTKPCEEQYGSTYRCVSVLTVLHQDWLNGKEYKCKVSNKALPAPIEKTISKAKGQPREPQVYTLPPSRKEMTKNQVSLTCLVKGFYPSDIAVEWESNGQPENNYKTTPPVLKSDGSFFLYSKLTVDKSRWQQGNVFSCSVMHEALHNHYTQKSLSLSPGK

SEQ ID NO: 145 - protein, 227 aa, Artificial Sequence
  Synthetic peptide
DKTHTCPPCPAPELLGGPSVFLFPPKPKDTLMISRTPEVTCVVVDVSHEDPEVKFNWYVDGVEVHNAKTKPCEEQYGSTYRCVSVLTVLHQDWLNGKEYKCKVSNKALPAPIEKTISKAKGQPREPQVYTLPPSREEMTKNQVSLTCLVKGFYPSDIAVEWESNGQPENNYDTTPPVLDSDGSFFLYSDLTVDKSRWQQGNVFSCSVMHEALHNHYTQKSLSLSPGK

SEQ ID NO: 146 - protein, 232 aa, Artificial Sequence
  Synthetic peptide
EPKSSDKTHTCPPCPAPELLGGPSVFLFPPKPKDTLMISRTPEVTCVVVDVSHEDPEVKFNWYVDGVEVHNAKTKPCEEQYGSTYRCVSVLTVLHQDWLNGKEYKCKVSNKALPAPIEKTISKAKGQPREPQVYTLPPSRKEMTKNQVSLTCLVKGFYPSDIAVEWESNGQPENNYKTTPPVLKSDGSFFLYSKLTVDKSRWQQGNVFSCSVMHEALHNHYTQKSLSLSPGK

SEQ ID NO: 147 - protein, 232 aa, Artificial Sequence
  Synthetic peptide
EPKSSDKTHTCPPCPAPELLGGPSVFLFPPKPKDTLMISRTPEVTCVVVDVSHEDPEVKFNWYVDGVEVHNAKTKPCEEQYGSTYRCVSVLTVLHQDWLNGKEYKCKVSNKALPAPIEKTISKAKGQPREPQVYTLPPSREEMTKNQVSLTCLVKGFYPSDIAVEWESNGQPENNYDTTPPVLDSDGSFFLYSDLTVDKSRWQQGNVFSCSVMHEALHNHYTQKSLSLSPGK

SEQ ID NO: 148 - protein, 232 aa, Artificial Sequence
  Synthetic peptide
EPKSSDKTHTCPPCPAPEAAGGPSVFLFPPKPKDTLMISRTPEVTCVVVDVSHEDPEVKFNWYVDGVEVHNAKTKPREEQYNSTYRVVSVLTVLHQDWLNGKEYKCKVSNKALPAPIEKTISKAKGQPREPQVYTLPPSRKEMTKNQVSLTCLVKGFYPSDIAVEWESNGQPENNYKTTPPVLKSDGSFFLYSKLTVDKSRWQQGNVFSCSVMHEALHNHYTQKSLSLSPGK

SEQ ID NO: 149 - protein, 232 aa, Artificial Sequence
  Synthetic peptide
EPKSSDKTHTCPPCPAPEAAGGPSVFLFPPKPKDTLMISRTPEVTCVVVDVSHEDPEVKFNWYVDGVEVHNAKTKPREEQYNSTYRVVSVLTVLHQDWLNGKEYKCKVSNKALPAPIEKTISKAKGQPREPQVYTLPPSREEMTKNQVSLTCLVKGFYPSDIAVEWESNGQPENNYDTTPPVLDSDGSFFLYSDLTVDKSRWQQGNVFSCSVMHEALHNHYTQKSLSLSPGK

SEQ ID NO: 150 - protein, 217 aa, Artificial Sequence
  Synthetic peptide
APELLGGPSVFLFPPKPKDTLMISRTPEVTCVVVDVSHEDPEVKFNWYVDGVEVHNAKTKPREEQYNSTYRVVSVLTVLHQDWLNGKEYKCKVSNKALPAPIEKTISKAKGQPREPQVTTLPPSREEMTKNQVSLTCLVKGFYPSDIAVEWESNGQPENNYDTTPPVLDSDGSFFLYSDLTVDKSRWQQGNVFSCSVMHEALHNHYTQKSLSLSPGK

SEQ ID NO: 151 - protein, 7 aa, Artificial Sequence
  Synthetic peptide
NARMGVS

SEQ ID NO: 152 - protein, 16 aa, Artificial Sequence
  Synthetic peptide
HIFSNAEKSYRTSLKS

SEQ ID NO: 153 - protein, 17 aa, Artificial Sequence
  Synthetic peptide
IPGYGGNGDYHYYGMDV

SEQ ID NO: 154 - protein, 11 aa, Artificial Sequence
  Synthetic peptide
RASQGIRNDLG

SEQ ID NO: 155 - protein, 7 aa, Artificial Sequence
  Synthetic peptide
ASSTLQS

SEQ ID NO: 156 - protein, 9 aa, Artificial Sequence
  Synthetic peptide
LQHNNFPWT

SEQ ID NO: 157 - protein, 127 aa, Artificial Sequence
  Synthetic peptide
QVTLKESGPVLVKPTETLTLTCTVSGFSLINARMGVSWIRQPPGKALEWLAHIFSNAEKSYRTSLKSRLTISKDTSKSQVVLTMTNMDPVDTATYYCARIPGYGGNGDYHYYGMDVWGQGTTVTVSS

SEQ ID NO: 158 - protein, 107 aa, Artificial Sequence
  Synthetic peptide
DIQMTQSPSSLSASLGDRVTITCRASQGIRNDLGWYQQKPGKAPKRLIYASSTLQSGVPSRFSGSGSGTEFTLTISSLQPEDFATYYCLQHNNFPWTFGQGTKVEIK

SEQ ID NO: 159 - protein, 249 aa, Artificial Sequence
  Synthetic peptide
QVTLKESGPVLVKPTETLTLTCTVSGFSLINARMGVSWIRQPPGKALEWLAHIFSNAEKSYRTSLKSRLTISKDTSKSQVVLTMTNMDPVDTATYYCARIPGYGGNGDYHYYGMDVWGQGTTVTVSSGGGGSGGGGSGGGGSDIQMTQSPSSLSASLGDRVTITCRASQGIRNDLGWYQQKPGKAPKRLIYASSTLQSGVPSRFSGSGSGTEFTLTISSLQPEDFATYYCLQHNNFPWTFGQGTKVEIK

SEQ ID NO: 160 - protein, 504 aa, Artificial Sequence
  Synthetic peptide
QVTLKESGPVLVKPTETLTLTCTVSGFSLINARMGVSWIRQPPGKALEWLAHIFSNAEKSYRTSLKSRLTISKDTSKSQVVLTMTNMDPVDTATYYCARIPGYGGNGDYHYYGMDVWGQGTTVTVSSGGGGSGGGGSGGGGSDIQMTQSPSSLSASLGDRVTITCRASQGIRNDLGWYQQKPGKAPKRLIYASSTLQSGVPSRFSGSGSGTEFTLTISSLQPEDFATYYCLQHNNFPWTFGQGTKVEIKSGGGGSEVQLVESGGGLVQPGGSLKLSCAASGFTFNKYAMNWVRQAPGKGLEWVARIRSKYNNYATYYADSVKDRFTISRDDSKNTAYLQMNNLKTEDTAVYYCVRHGNFGNSYISYWAYWGQGTLVTVSSGGGGSGGGGSGGGGSQTVVTQEPSLTVSPGGTVTLTCGSSTGAVTSGNYPNWVQQKPGQAPRGLIGGTKFLAPGTPARFSGSLLGGKAALTLSGVQPEDEAEYYCVLWYSNRWVFGGGTKLTVL

SEQ ID NO: 161 - protein, 7 aa, Artificial Sequence
  Synthetic peptide
NARMGVS

SEQ ID NO: 162 - protein, 16 aa, Artificial Sequence
  Synthetic peptide
HIFSNDEKTYSTSLKS

SEQ ID NO: 163 - protein, 15 aa, Artificial Sequence
  Synthetic peptide
IPYYGSGSHNYGMDV

SEQ ID NO: 164 - protein, 11 aa, Artificial Sequence
  Synthetic peptide
RASQDIRNDFG

SEQ ID NO: 165 - protein, 7 aa, Artificial Sequence
  Synthetic peptide
AASTLQS

SEQ ID NO: 166 - protein, 9 aa, Artificial Sequence
  Synthetic peptide
LQYNTYPWT

SEQ ID NO: 167 - protein, 125 aa, Artificial Sequence
  Synthetic peptide
QVTLKESGPVLVKPTETLTLTCTVSGFSLRNARMGVSWIRQPPGKALEWLAHIFSNDEKTYSTSLKSRLTISRDTSKGQVVLTMTKMDPVDTATYYCARIPYYGSGSHNYGMDVWGQGTTVTVSS

SEQ ID NO: 168 - protein, 107 aa, Artificial Sequence
  Synthetic peptide
DIQMTQSPSSLSASVGDRVTITCRASQDIRNDFGWYQQKPGKAPQRLLYAASTLQSGVPSRFSGSGSGTEFTLTISSLQPEDFATYYCLQYNTYPWTFGQGTKVEIK

SEQ ID NO: 169 - protein, 247 aa, Artificial Sequence
  Synthetic peptide
QVTLKESGPVLVKPTETLTLTCTVSGFSLRNARMGVSWIRQPPGKALEWLAHIFSNDEKTYSTSLKSRLTISRDTSKGQVVLTMTKMDPVDTATYYCARIPYYGSGSHNYGMDVWGQGTTVTVSSGGGGSGGGGSGGGGSDIQMTQSPSSLSASVGDRVTITCRASQDIRNDFGWYQQKPGKAPQRLLYAASTLQSGVPSRFSGSGSGTEFTLTISSLQPEDFATYYCLQYNTYPWTFGQGTKVEIK

SEQ ID NO: 170 - protein, 502 aa, Artificial Sequence
  Synthetic peptide
QVTLKESGPVLVKPTETLTLTCTVSGFSLRNARMGVSWIRQPPGKALEWLAHIFSNDEKTYSTSLKSRLTISRDTSKGQVVLTMTKMDPVDTATYYCARIPYYGSGSHNYGMDVWGQGTTVTVSSGGGGSGGGGSGGGGSDIQMTQSPSSLSASVGDRVTITCRASQDIRNDFGWYQQKPGKAPQRLLYAASTLQSGVPSRFSGSGSGTEFTLTISSLQPEDFATYYCLQYNTYPWTFGQGTKVEIKSGGGGSEVQLVESGGGLVQPGGSLKLSCAASGFTFNKYAMNWVRQAPGKGLEWVARIRSKYNNYATYYADSVKDRFTISRDDSKNTAYLQMNNLKTEDTAVYYCVRHGNFGNSYISYWAYWGQGTLVTVSSGGGGSGGGGSGGGGSQTVVTQEPSLTVSPGGTVTLTCGSSTGAVTSGNYPNWVQQKPGQAPRGLIGGTKFLAPGTPARFSGSLLGGKAALTLSGVQPEDEAEYYCVLWYSNRWVFGGGTKLTVL

SEQ ID NO: 171 - protein, 7 aa, Artificial Sequence
  Synthetic peptide
NARMAVS

SEQ ID NO: 172 - protein, 16 aa, Artificial Sequence
  Synthetic peptide
HIFSNGEKSYSTSLKS

SEQ ID NO: 173 - protein, 13 aa, Artificial Sequence
  Synthetic peptide
IVGYSDWLLPFDH

SEQ ID NO: 174 - protein, 11 aa, Artificial Sequence
  Synthetic peptide
RASQNINRFLN

SEQ ID NO: 175 - protein, 7 aa, Artificial Sequence
  Synthetic peptide
AASSLQS

SEQ ID NO: 176 - protein, 9 aa, Artificial Sequence
  Synthetic peptide
LQHNSYPWT

SEQ ID NO: 177 - protein, 123 aa, Artificial Sequence
  Synthetic peptide
QVTLKESGPALVKPTETLTLTCTVSGFSLSNARMAVSWIRQPPGKALEWLAHIFSNGEKSYSTSLKSRLTISKDTSKTQVVLTMTNTDPVDTATYFCARIVGYSDWLLPFDHWGQGIMVTVSS

SEQ ID NO: 178 - protein, 107 aa, Artificial Sequence
  Synthetic peptide
DIQMTQSPSSLSASVGDRVTITCRASQNINRFLNWYQQKPGKAPKLLIYAASSLQSGVPSRFSGSGSGTDFTLTISSLQPEDFATYYCLQHNSYPWTFGQGTKVDIK

SEQ ID NO: 179 - protein, 245 aa, Artificial Sequence
  Synthetic peptide
QVTLKESGPALVKPTETLTLTCTVSGFSLSNARMAVSWIRQPPGKALEWLAHIFSNGEKSYSTSLKSRLTISKDTSKTQVVLTMTNTDPVDTATYFCARIVGYSDWLLPFDHWGQGIMVTVSSGGGGSGGGGSGGGGSDIQMTQSPSSLSASVGDRVTITCRASQNINRFLNWYQQKPGKAPKLLIYAASSLQSGVPSRFSGSGSGTDFTLTISSLQPEDFATYYCLQHNSYPWTFGQGTKVDIK

SEQ ID NO: 180 - protein, 500 aa, Artificial Sequence
  Synthetic peptide
QVTLKESGPALVKPTETLTLTCTVSGFSLSNARMAVSWIRQPPGKALEWLAHIFSNGEKSYSTSLKSRLTISKDTSKTQVVLTMTNTDPVDTATYFCARIVGYSDWLLPFDHWGQGIMVTVSSGGGGSGGGGSGGGGSDIQMTQSPSSLSASVGDRVTITCRASQNINRFLNWYQQKPGKAPKLLIYAASSLQSGVPSRFSGSGSGTDFTLTISSLQPEDFATYYCLQHNSYPWTFGQGTKVDIKSGGGGSEVQLVESGGGLVQPGGSLKLSCAASGFTFNKYAMNWVRQAPGKGLEWVARIRSKYNNYATYYADSVKDRFTISRDDSKNTAYLQMNNLKTEDTAVYYCVRHGNFGNSYISYWAYWGQGTLVTVSSGGGGSGGGGSGGGGSQTVVTQEPSLTVSPGGTVTLTCGSSTGAVTSGNYPNWVQQKPGQAPRGLIGGTKFLAPGTPARFSGSLLGGKAALTLSGVQPEDEAEYYCVLWYSNRWVFGGGTKLTVL

SEQ ID NO: 181 - protein, 7 aa, Artificial Sequence
  Synthetic peptide
NAKMGVS

SEQ ID NO: 182 - protein, 16 aa, Artificial Sequence
  Synthetic peptide
HIFSNDEKSYSTSLKS

SEQ ID NO: 183 - protein, 14 aa, Artificial Sequence
  Synthetic peptide
IVGYGSGWYGYFDY

SEQ ID NO: 184 - protein, 11 aa, Artificial Sequence
  Synthetic peptide
RASQDIRDDLG

SEQ ID NO: 185 - protein, 7 aa, Artificial Sequence
  Synthetic peptide
GASTLQS

SEQ ID NO: 186 - protein, 9 aa, Artificial Sequence
  Synthetic peptide
LQHNSYPLT

SEQ ID NO: 187 - protein, 124 aa, Artificial Sequence
  Synthetic peptide
QVTLKESGPALVKPTETLTLTCTLSGFSLNNAKMGVSWIRQPPGKALEWLAHIFSNDEKSYSTSLKSRLTISKDTSKGQVVLTMTNMDPVDTATYYCARIVGYGSGWYGYFDYWGQGTLVTVSS

SEQ ID NO: 188 - protein, 107 aa, Artificial Sequence
  Synthetic peptide
DIQMTQSPSSLSASVGDRVTITCRASQDIRDDLGWYQQKPGNAPKRLIYGASTLQSGVPSRFSGSGSGTEFTLTISSLQPEDFATYYCLQHNSYPLTFGGGTKVDIK

SEQ ID NO: 189 - protein, 246 aa, Artificial Sequence
  Synthetic peptide
QVTLKESGPALVKPTETLTLTCTLSGFSLNNAKMGVSWIRQPPGKALEWLAHIFSNDEKSYSTSLKSRLTISKDTSKGQVVLTMTNMDPVDTATYYCARIVGYGSGWYGYFDYWGQGTLVTVSSGGGGSGGGGSGGGGSDIQMTQSPSSLSASVGDRVTITCRASQDIRDDLGWYQQKPGNAPKRLIYGASTLQSGVPSRFSGSGSGTEFTLTISSLQPEDFATYYCLQHNSYPLTFGGGTKVDIK

SEQ ID NO: 190 - protein, 501 aa, Artificial Sequence
  Synthetic peptide
QVTLKESGPALVKPTETLTLTCTLSGFSLNNAKMGVSWIRQPPGKALEWLAHIFSNDEKSYSTSLKSRLTISKDTSKGQVVLTMTNMDPVDTATYYCARIVGYGSGWYGYFDYWGQGTLVTVSSGGGGSGGGGSGGGGSDIQMTQSPSSLSASVGDRVTITCRASQDIRDDLGWYQQKPGNAPKRLIYGASTLQSGVPSRFSGSGSGTEFTLTISSLQPEDFATYYCLQHNSYPLTFGGGTKVDIKSGGGGSEVQLVESGGGLVQPGGSLKLSCAASGFTFNKYAMNWVRQAPGKGLEWVARIRSKYNNYATYYADSVKDRFTISRDDSKNTAYLQMNNLKTEDTAVYYCVRHGNFGNSYISYWAYWGQGTLVTVSSGGGGSGGGGSGGGGSQTVVTQEPSLTVSPGGTVTLTCGSSTGAVTSGNYPNWVQQKPGQAPRGLIGGTKFLAPGTPARFSGSLLGGKAALTLSGVQPEDEAEYYCVLWYSNRWVFGGGTKLTVL

SEQ ID NO: 191 - protein, 7 aa, Artificial Sequence
  Synthetic peptide
NARMGVS

SEQ ID NO: 192 - protein, 16 aa, Artificial Sequence
  Synthetic peptide
HIFWNDEKSYSTSLKS

SEQ ID NO: 193 - protein, 15 aa, Artificial Sequence
  Synthetic peptide
IPYYGSGSYNYGMDV

SEQ ID NO: 194 - protein, 11 aa, Artificial Sequence
  Synthetic peptide
RASQGIRNDLG

SEQ ID NO: 195 - protein, 7 aa, Artificial Sequence
  Synthetic peptide
AASSLQS

SEQ ID NO: 196 - protein, 9 aa, Artificial Sequence
  Synthetic peptide
LQHNTYPLT

SEQ ID NO: 197 - protein, 125 aa, Artificial Sequence
  Synthetic peptide
QVTLKESGPMLVKPTETLTLTCTFSGFSLRNARMGVSWIRQPPGKALEWLAHIFWNDEKSYSTSLKSRLTISKDTSKSQVVLTMTNMDPVDTATYYCARIPYYGSGSYNYGMDVWGQGTTVTVSS

SEQ ID NO: 198 - protein, 107 aa, Artificial Sequence
  Synthetic peptide
DIQMTQSPSSLSASVGDRVTITCRASQGIRNDLGWYQQKPGKAPKRLIYAASSLQSGVPSRFSGSGSGTEFTLTISSLQPEDFATYYCLQHNTYPLTFGGGTKVDIK

SEQ ID NO: 199 - protein, 247 aa, Artificial Sequence
  Synthetic peptide
QVTLKESGPMLVKPTETLTLTCTFSGFSLRNARMGVSWIRQPPGKALEWLAHIFWNDEKSYSTSLKSRLTISKDTSKSQVVLTMTNMDPVDTATYYCARIPYYGSGSYNYGMDVWGQGTTVTVSSGGGGSGGGGSGGGGSDIQMTQSPSSLSASVGDRVTITCRASQGIRNDLGWYQQKPGKAPKRLIYAASSLQSGVPSRFSGSGSGTEFTLTISSLQPEDFATYYCLQHNTYPLTFGGGTKVDIK

SEQ ID NO: 200 - protein, 502 aa, Artificial Sequence
  Synthetic peptide
QVTLKESGPMLVKPTETLTLTCTFSGFSLRNARMGVSWIRQPPGKALEWLAHIFWNDEKSYSTSLKSRLTISKDTSKSQVVLTMTNMDPVDTATYYCARIPYYGSGSYNYGMDVWGQGTTVTVSSGGGGSGGGGSGGGGSDIQMTQSPSSLSASVGDRVTITCRASQGIRNDLGWYQQKPGKAPKRLIYAASSLQSGVPSRFSGSGSGTEFTLTISSLQPEDFATYYCLQHNTYPLTFGGGTKVDIKSGGGGSEVQLVESGGGLVQPGGSLKLSCAASGFTFNKYAMNWVRQAPGKGLEWVARIRSKYNNYATYYADSVKDRFTISRDDSKNTAYLQMNNLKTEDTAVYYCVRHGNFGNSYISYWAYWGQGTLVTVSSGGGGSGGGGSGGGGSQTVVTQEPSLTVSPGGTVTLTCGSSTGAVTSGNYPNWVQQKPGQAPRGLIGGTKFLAPGTPARFSGSLLGGKAALTLSGVQPEDEAEYYCVLWYSNRWVFGGGTKLTVL

SEQ ID NO: 201 - protein, 7 aa, Artificial Sequence
  Synthetic peptide
NARMAVS

SEQ ID NO: 202 - protein, 16 aa, Artificial Sequence
  Synthetic peptide
HIFSNDEKSYSPSLKS

SEQ ID NO: 203 - protein, 14 aa, Artificial Sequence
  Synthetic peptide
IVGYGTGWYGFFDY

SEQ ID NO: 204 - protein, 11 aa, Artificial Sequence
  Synthetic peptide
RASQGIRNDLG

SEQ ID NO: 205 - protein, 7 aa, Artificial Sequence
  Synthetic peptide
AASVLQS

SEQ ID NO: 206 - protein, 9 aa, Artificial Sequence
  Synthetic peptide
LQHNSYPLT

SEQ ID NO: 207 - protein, 124 aa, Artificial Sequence
  Synthetic peptide
QVTLKESGPTLVKPTETLTLTCTLSGFSLNNARMAVSWIRQPPGKTLEWLAHIFSNDEKSYSPSLKSRLTISKDTSKSQVVLTMTNMDPEDTATYYCARIVGYGTGWYGFFDYWGQGILVTVSS

SEQ ID NO: 208 - protein, 107 aa, Artificial Sequence
  Synthetic peptide
DIQMTQSPSSLSASVGDRVTITCRASQGIRNDLGWFQQKPGKAPKRLIYAASVLQSGVPSRFSGSGSGTEFTLTISSLQPEDFATYYCLQHNSYPLTFGGGTKVDIK

SEQ ID NO: 209 - protein, 246 aa, Artificial Sequence
  Synthetic peptide
QVTLKESGPTLVKPTETLTLTCTLSGFSLNNARMAVSWIRQPPGKTLEWLAHIFSNDEKSYSPSLKSRLTISKDTSKSQVVLTMTNMDPEDTATYYCARIVGYGTGWYGFFDYWGQGILVTVSSGGGGSGGGGSGGGGSDIQMTQSPSSLSASVGDRVTITCRASQGIRNDLGWFQQKPGKAPKRLIYAASVLQSGVPSRFSGSGSGTEFTLTISSLQPEDFATYYCLQHNSYPLTFGGGTKVDIK

SEQ ID NO: 210 - protein, 501 aa, Artificial Sequence
  Synthetic peptide
QVTLKESGPTLVKPTETLTLTCTLSGFSLNNARMAVSWIRQPPGKTLEWLAHIFSNDEKSYSPSLKSRLTISKDTSKSQVVLTMTNMDPEDTATYYCARIVGYGTGWYGFFDYWGQGILVTVSSGGGGSGGGGSGGGGSDIQMTQSPSSLSASVGDRVTITCRASQGIRNDLGWFQQKPGKAPKRLIYAASVLQSGVPSRFSGSGSGTEFTLTISSLQPEDFATYYCLQHNSYPLTFGGGTKVDIKSGGGGSEVQLVESGGGLVQPGGSLKLSCAASGFTFNKYAMNWVRQAPGKGLEWVARIRSKYNNYATYYADSVKDRFTISRDDSKNTAYLQMNNLKTEDTAVYYCVRHGNFGNSYISYWAYWGQGTLVTVSSGGGGSGGGGSGGGGSQTVVTQEPSLTVSPGGTVTLTCGSSTGAVTSGNYPNWVQQKPGQAPRGLIGGTKFLAPGTPARFSGSLLGGKAALTLSGVQPEDEAEYYCVLWYSNRWVFGGGTKLTVL

SEQ ID NO: 211 - protein, 7 aa, Artificial Sequence
  Synthetic peptide
NARMGVS

SEQ ID NO: 212 - protein, 16 aa, Artificial Sequence
  Synthetic peptide
HIFSNDEKSYSTSLKN

SEQ ID NO: 213 - protein, 14 aa, Artificial Sequence
  Synthetic peptide
IVGYGTGWFGYFDY

SEQ ID NO: 214 - protein, 11 aa, Artificial Sequence
  Synthetic peptide
RASQDIRTDLA

SEQ ID NO: 215 - protein, 7 aa, Artificial Sequence
  Synthetic peptide
AASSLQS

SEQ ID NO: 216 - protein, 9 aa, Artificial Sequence
  Synthetic peptide
LQHNRYPLT

SEQ ID NO: 217 - protein, 124 aa, Artificial Sequence
  Synthetic peptide
QVTLKESGPTLVKPTETLTLTCTVSGFSLNNARMGVSWIRQPPGKALEWLAHIFSNDEKSYSTSLKNRLTISKDSSKTQVVLTMTNVDPVDTATYYCARIVGYGTGWFGYFDYWGQGTQVTVSS

SEQ ID NO: 218 - protein, 107 aa, Artificial Sequence
  Synthetic peptide
DIQMTQSPSSLSASVGDRVTITCRASQDIRTDLAWYQQKPGKAPKRLIYAASSLQSGVPSRFSGSGSGTEFTLTISSLQPEDFATYYCLQHNRYPLTFGGGTKVDIK

SEQ ID NO: 219 - protein, 246 aa, Artificial Sequence
  Synthetic peptide
QVTLKESGPTLVKPTETLTLTCTVSGFSLNNARMGVSWIRQPPGKALEWLAHIFSNDEKSYSTSLKNRLTISKDSSKTQVVLTMTNVDPVDTATYYCARIVGYGTGWFGYFDYWGQGTQVTVSSGGGGSGGGGSGGGGSDIQMTQSPSSLSASVGDRVTITCRASQDIRTDLAWYQQKPGKAPKRLIYAASSLQSGVPSRFSGSGSGTEFTLTISSLQPEDFATYYCLQHNRYPLTFGGGTKVDIK

SEQ ID NO: 220 - protein, 501 aa, Artificial Sequence
  Synthetic peptide
QVTLKESGPTLVKPTETLTLTCTVSGFSLNNARMGVSWIRQPPGKALEWLAHIFSNDEKSYSTSLKNRLTISKDSSKTQVVLTMTNVDPVDTATYYCARIVGYGTGWFGYFDYWGQGTQVTVSSGGGGSGGGGSGGGGSDIQMTQSPSSLSASVGDRVTITCRASQDIRTDLAWYQQKPGKAPKRLIYAASSLQSGVPSRFSGSGSGTEFTLTISSLQPEDFATYYCLQHNRYPLTFGGGTKVDIKSGGGGSEVQLVESGGGLVQPGGSLKLSCAASGFTFNKYAMNWVRQAPGKGLEWVARIRSKYNNYATYYADSVKDRFTISRDDSKNTAYLQMNNLKTEDTAVYYCVRHGNFGNSYISYWAYWGQGTLVTVSSGGGGSGGGGSGGGGSQTVVTQEPSLTVSPGGTVTLTCGSSTGAVTSGNYPNWVQQKPGQAPRGLIGGTKFLAPGTPARFSGSLLGGKAALTLSGVQPEDEAEYYCVLWYSNRWVFGGGTKLTVL

SEQ ID NO: 221 - protein, 7 aa, Artificial Sequence
  Synthetic peptide
YARMGVS

SEQ ID NO: 222 - protein, 16 aa, Artificial Sequence
  Synthetic peptide
QIFSNDEKSYSTSLKS

SEQ ID NO: 223 - protein, 14 aa, Artificial Sequence
  Synthetic peptide
IVGYGTGWYGFFDY

SEQ ID NO: 224 - protein, 11 aa, Artificial Sequence
  Synthetic peptide
RASQGIRNDLG

SEQ ID NO: 225 - protein, 7 aa, Artificial Sequence
  Synthetic peptide
AASSLQS

SEQ ID NO: 226 - protein, 9 aa, Artificial Sequence
  Synthetic peptide
LQHNSYPLT

SEQ ID NO: 227 - protein, 124 aa, Artificial Sequence
  Synthetic peptide
QVTLKESGPALVKPTETLTLTCTVSGFSLSYARMGVSWIRQPPGKALEWLAQIFSNDEKSYSTSLKSRLTISKGTSNSQVVLTMTNMDPEDTATYYCARIVGYGTGWYGFFDYWGQGILVTVSS

SEQ ID NO: 228 - protein, 107 aa, Artificial Sequence
  Synthetic peptide
DIQMTQSPSSLSASVGDRVTITCRASQGIRNDLGWYQQKPGKAPKRLIYAASSLQSGVPSRFSGSGSGTEFTLTISSLQPEDFATYYCLQHNSYPLTFGGGTKVDIK

SEQ ID NO: 229 - protein, 246 aa, Artificial Sequence
  Synthetic peptide
QVTLKESGPALVKPTETLTLTCTVSGFSLSYARMGVSWIRQPPGKALEWLAQIFSNDEKSYSTSLKSRLTISKGTSNSQVVLTMTNMDPEDTATYYCARIVGYGTGWYGFFDYWGQGILVTVSSGGGGSGGGGSGGGGSDIQMTQSPSSLSASVGDRVTITCRASQGIRNDLGWYQQKPGKAPKRLIYAASSLQSGVPSRFSGSGSGTEFTLTISSLQPEDFATYYCLQHNSYPLTFGGGTKVDIK

SEQ ID NO: 230 - protein, 501 aa, Artificial Sequence
  Synthetic peptide
QVTLKESGPALVKPTETLTLTCTVSGFSLSYARMGVSWIRQPPGKALEWLAQIFSNDEKSYSTSLKSRLTISKGTSNSQVVLTMTNMDPEDTATYYCARIVGYGTGWYGFFDYWGQGILVTVSSGGGGSGGGGSGGGGSDIQMTQSPSSLSASVGDRVTITCRASQGIRNDLGWYQQKPGKAPKRLIYAASSLQSGVPSRFSGSGSGTEFTLTISSLQPEDFATYYCLQHNSYPLTFGGGTKVDIKSGGGGSEVQLVESGGGLVQPGGSLKLSCAASGFTFNKYAMNWVRQAPGKGLEWVARIRSKYNNYATYYADSVKDRFTISRDDSKNTAYLQMNNLKTEDTAVYYCVRHGNFGNSYISYWAYWGQGTLVTVSSGGGGSGGGGSGGGGSQTVVTQEPSLTVSPGGTVTLTCGSSTGAVTSGNYPNWVQQKPGQAPRGLIGGTKFLAPGTPARFSGSLLGGKAALTLSGVQPEDEAEYYCVLWYSNRWVFGGGTKLTVL

SEQ ID NO: 231 - protein, 7 aa, Artificial Sequence
  Synthetic peptide
NARMGVS

SEQ ID NO: 232 - protein, 16 aa, Artificial Sequence
  Synthetic peptide
HIFSNDEKSYSTSLKS

SEQ ID NO: 233 - protein, 17 aa, Artificial Sequence
  Synthetic peptide
IPGYGGNFYYHYYGMDV

SEQ ID NO: 234 - protein, 11 aa, Artificial Sequence
  Synthetic peptide
RASQGIRNDLA

SEQ ID NO: 235 - protein, 7 aa, Artificial Sequence
  Synthetic peptide
AASTVQS

SEQ ID NO: 236 - protein, 9 aa, Artificial Sequence
  Synthetic peptide
LQHNSFPWT

SEQ ID NO: 237 - protein, 127 aa, Artificial Sequence
  Synthetic peptide
QVTLKESGPTLVKPTETLTLTCTVSGFSLSNARMGVSWIRQPPGKALEWLAHIFSNDEKSYSTSLKSRLTISKDTSKSQVVLTMTNMDPVDTATYYCARIPGYGGNFYYHYYGMDVWGQGTTVTVSS

SEQ ID NO: 238 - protein, 107 aa, Artificial Sequence
  Synthetic peptide
DIQMTQSPSSLSASVGDRVTITCRASQGIRNDLAWYQQKPGKAPKRLIYAASTVQSGVPSRFSGSGSGTEFALTISSLQPEDFATYYCLQHNSFPWTFGQGTKVDIK

SEQ ID NO: 239 - protein, 249 aa, Artificial Sequence
  Synthetic peptide
QVTLKESGPTLVKPTETLTLTCTVSGFSLSNARMGVSWIRQPPGKALEWLAHIFSNDEKSYSTSLKSRLTISKDTSKSQVVLTMTNMDPVDTATYYCARIPGYGGNFYYHYYGMDVWGQGTTVTVSSGGGGSGGGGSGGGGSDIQMTQSPSSLSASVGDRVTITCRASQGIRNDLAWYQQKPGKAPKRLIYAASTVQSGVPSRFSGSGSGTEFALTISSLQPEDFATYYCLQHNSFPWTFGQGTKVDIK

SEQ ID NO: 240 - protein, 504 aa, Artificial Sequence [sequence omitted]

SEQ ID NO: 241 - protein, 7 aa, Artificial Sequence
  Synthetic peptide
NARMGVS

SEQ ID NO: 242 - protein, 16 aa, Artificial Sequence
  Synthetic peptide
HIFSNDEKSYSTSLKS

SEQ ID NO: 243 - protein, 14 aa, Artificial Sequence
  Synthetic peptide
MPEYSSGWSGAFDI

SEQ ID NO: 244 - protein, 11 aa, Artificial Sequence
  Synthetic peptide
RASQDIRDDLG

SEQ ID NO: 245 - protein, 7 aa, Artificial Sequence
  Synthetic peptide
GASTLQS

SEQ ID NO: 246 - protein, 9 aa, Artificial Sequence
  Synthetic peptide
LQHNSYPLT

SEQ ID NO: 247 - protein, 124 aa, Artificial Sequence
  Synthetic peptide
QVTLKESGPVLVKPTETLTLTCTVSGFSFRNARMGVSWIRQPPGKALEWLAHIFSNDEKSYSTSLKSRLTISKDTSKSQVVLTLTNMDPVDTATYFCARMPEYSSGWSGAFDIWGQGTMVTVSS

SEQ ID NO: 248 - protein, 107 aa, Artificial Sequence; identical to SEQ ID NO: 188
  Synthetic peptide

SEQ ID NO: 249 - protein, 246 aa, Artificial Sequence
  Synthetic peptide
QVTLKESGPVLVKPTETLTLTCTVSGFSFRNARMGVSWIRQPPGKALEWLAHIFSNDEKSYSTSLKSRLTISKDTSKSQVVLTLTNMDPVDTATYFCARMPEYSSGWSGAFDIWGQGTMVTVSSGGGGSGGGGSGGGGSDIQMTQSPSSLSASVGDRVTITCRASQDIRDDLGWYQQKPGNAPKRLIYGASTLQSGVPSRFSGSGSGTEFTLTISSLQPEDFATYYCLQHNSYPLTFGGGTKVDIK

SEQ ID NO: 250 - protein, 501 aa, Artificial Sequence
  Synthetic peptide
QVTLKESGPVLVKPTETLTLTCTVSGFSFRNARMGVSWIRQPPGKALEWLAHIFSNDEKSYSTSLKSRLTISKDTSKSQVVLTLTNMDPVDTATYFCARMPEYSSGWSGAFDIWGQGTMVTVSSGGGGSGGGGSGGGGSDIQMTQSPSSLSASVGDRVTITCRASQDIRDDLGWYQQKPGNAPKRLIYGASTLQSGVPSRFSGSGSGTEFTLTISSLQPEDFATYYCLQHNSYPLTFGGGTKVDIKSGGGGSEVQLVESGGGLVQPGGSLKLSCAASGFTFNKYAMNWVRQAPGKGLEWVARIRSKYNNYATYYADSVKDRFTISRDDSKNTAYLQMNNLKTEDTAVYYCVRHGNFGNSYISYWAYWGQGTLVTVSSGGGGSGGGGSGGGGSQTVVTQEPSLTVSPGGTVTLTCGSSTGAVTSGNYPNWVQQKPGQAPRGLIGGTKFLAPGTPARFSGSLLGGKAALTLSGVQPEDEAEYYCVLWYSNRWVFGGGTKLTVL

SEQ ID NO: 251 - protein, 7 aa, Artificial Sequence
  Synthetic peptide
NAKMGVS

SEQ ID NO: 252 - protein, 16 aa, Artificial Sequence
  Synthetic peptide
QIFSNGEKSYSTSLKS

SEQ ID NO: 253 - protein, 14 aa, Artificial Sequence
  Synthetic peptide
IVGYGSGWYGYFDY

SEQ ID NO: 254 - protein, 11 aa, Artificial Sequence
  Synthetic peptide
RASQGIRNDLG

SEQ ID NO: 255 - protein, 7 aa, Artificial Sequence
  Synthetic peptide
GASTLQS

SEQ ID NO: 256 - protein, 9 aa, Artificial Sequence
  Synthetic peptide
LQHNSYPLT

SEQ ID NO: 257 - protein, 124 aa, Artificial Sequence
  Synthetic peptide
QVTLKESGPVLVKPTETLTLTCTLSGFSLNNAKMGVSWIRQPPGKALEWLAQIFSNGEKSYSTSLKSRLTISKDTSKGQVVLTMTNMDPVDTATYYCSRIVGYGSGWYGYFDYWGQGTLVTVSS

SEQ ID NO: 258 - protein, 107 aa, Artificial Sequence
  Synthetic peptide
DIQMTQSPSSLSASVGDRVTITCRASQGIRNDLGWYQQKPGKAPKRLIYGASTLQSGVPSRFSGSGSGTEFTLTISSLQPEDFATYYCLQHNSYPLTFGGGTKVEIK

SEQ ID NO: 259 - protein, 246 aa, Artificial Sequence
  Synthetic peptide
QVTLKESGPVLVKPTETLTLTCTLSGFSLNNAKMGVSWIRQPPGKALEWLAQIFSNGEKSYSTSLKSRLTISKDTSKGQVVLTMTNMDPVDTATYYCSRIVGYGSGWYGYFDYWGQGTLVTVSSGGGGSGGGGSGGGGSDIQMTQSPSSLSASVGDRVTITCRASQGIRNDLGWYQQKPGKAPKRLIYGASTLQSGVPSRFSGSGSGTEFTLTISSLQPEDFATYYCLQHNSYPLTFGGGTKVEIK

SEQ ID NO: 260 - protein, 501 aa, Artificial Sequence
  Synthetic peptide
QVTLKESGPVLVKPTETLTLTCTLSGFSLNNAKMGVSWIRQPPGKALEWLAQIFSNGEKSYSTSLKSRLTISKDTSKGQVVLTMTNMDPVDTATYYCSRIVGYGSGWYGYFDYWGQGTLVTVSSGGGGSGGGGSGGGGSDIQMTQSPSSLSASVGDRVTITCRASQGIRNDLGWYQQKPGKAPKRLIYGASTLQSGVPSRFSGSGSGTEFTLTISSLQPEDFATYYCLQHNSYPLTFGGGTKVEIKSGGGGSEVQLVESGGGLVQPGGSLKLSCAASGFTFNKYAMNWVRQAPGKGLEWVARIRSKYNNYATYYADSVKDRFTISRDDSKNTAYLQMNNLKTEDTAVYYCVRHGNFGNSYISYWAYWGQGTLVTVSSGGGGSGGGGSGGGGSQTVVTQEPSLTVSPGGTVTLTCGSSTGAVTSGNYPNWVQQKPGQAPRGLIGGTKFLAPGTPARFSGSLLGGKAALTLSGVQPEDEAEYYCVLWYSNRWVFGGGTKLTVL

SEQ ID NO: 261 - protein, 7 aa, Artificial Sequence
  Synthetic peptide
NARMGVS

SEQ ID NO: 262 - protein, 16 aa, Artificial Sequence
  Synthetic peptide
NIFSNDEKSYSTSLKS

SEQ ID NO: 263 - protein, 14 aa, Artificial Sequence
  Synthetic peptide
IVGYGSGWYGYFDY

SEQ ID NO: 264 - protein, 11 aa, Artificial Sequence
  Synthetic peptide
RASQGIRNDLG

SEQ ID NO: 265 - protein, 7 aa, Artificial Sequence
  Synthetic peptide
AASSLQS

SEQ ID NO: 266 - protein, 9 aa, Artificial Sequence
  Synthetic peptide
LQHNSYPLT

SEQ ID NO: 267 - protein, 124 aa, Artificial Sequence
  Synthetic peptide
QVTLKESGPALVKPTETLTLTCTVSGFSLSNARMGVSWIRQPPGKALEWLANIFSNDEKSYSTSLKSRLTISKGTSKSQVVLTMTNMDPEDTATYYCARIVGYGSGWYGYFDYWGQGTLVTVSS

SEQ ID NO: 268 - protein, 107 aa, Artificial Sequence
  Synthetic peptide
DIQMTQSPSSLSASVGDRVTITCRASQGIRNDLGWYQQKPGKAPQRLIYAASSLQSGVPSRFSGSGSGTEFTLTISSLQPEDFATYYCLQHNSYPLTFGGGTKVEIK

SEQ ID NO: 269 - protein, 246 aa, Artificial Sequence
  Synthetic peptide
QVTLKESGPALVKPTETLTLTCTVSGFSLSNARMGVSWIRQPPGKALEWLANIFSNDEKSYSTSLKSRLTISKGTSKSQVVLTMTNMDPEDTATYYCARIVGYGSGWYGYFDYWGQGTLVTVSSGGGGSGGGGSGGGGSDIQMTQSPSSLSASVGDRVTITCRASQGIRNDLGWYQQKPGKAPQRLIYAASSLQSGVPSRFSGSGSGTEFTLTISSLQPEDFATYYCLQHNSYPLTFGGGTKVEIK

SEQ ID NO: 270 - protein, 501 aa, Artificial Sequence
  Synthetic peptide
QVTLKESGPALVKPTETLTLTCTVSGFSLSNARMGVSWIRQPPGKALEWLANIFSNDEKSYSTSLKSRLTISKGTSKSQVVLTMTNMDPEDTATYYCARIVGYGSGWYGYFDYWGQGTLVTVSSGGGGSGGGGSGGGGSDIQMTQSPSSLSASVGDRVTITCRASQGIRNDLGWYQQKPGKAPQRLIYAASSLQSGVPSRFSGSGSGTEFTLTISSLQPEDFATYYCLQHNSYPLTFGGGTKVEIKSGGGGSEVQLVESGGGLVQPGGSLKLSCAASGFTFNKYAMNWVRQAPGKGLEWVARIRSKYNNYATYYADSVKDRFTISRDDSKNTAYLQMNNLKTEDTAVYYCVRHGNFGNSYISYWAYWGQGTLVTVSSGGGGSGGGGSGGGGSQTVVTQEPSLTVSPGGTVTLTCGSSTGAVTSGNYPNWVQQKPGQAPRGLIGGTKFLAPGTPARFSGSLLGGKAALTLSGVQPEDEAEYYCVLWYSNRWVFGGGTKLTVL

SEQ ID NO: 271 - protein, 7 aa, Artificial Sequence
  Synthetic peptide
NARMGVS

SEQ ID NO: 272 - protein, 16 aa, Artificial Sequence
  Synthetic peptide
HIFSNDEKSYSTSLKN

SEQ ID NO: 273 - protein, 14 aa, Artificial Sequence
  Synthetic peptide
IVGYGSGWYGFFDY

SEQ ID NO: 274 - protein, 11 aa, Artificial Sequence
  Synthetic peptide
RASQGIRNDLG

SEQ ID NO: 275 - protein, 7 aa, Artificial Sequence
  Synthetic peptide
AASTLQS

SEQ ID NO: 276 - protein, 9 aa, Artificial Sequence
  Synthetic peptide
LQHNSYPLT

SEQ ID NO: 277 - protein, 124 aa, Artificial Sequence
  Synthetic peptide
QVTLKESGPTLVKPTETLTLTCTLSGFSLNNARMGVSWIRQPPGKALEWLAHIFSNDEKSYSTSLKNRLTISKDSSKTQVVLTMTNVDPVDTATYYCARIVGYGSGWYGFFDYWGQGTLVTVSS

SEQ ID NO: 278 - protein, 107 aa, Artificial Sequence
  Synthetic peptide
DIQMTQSPSSLSASVGDRVTITCRASQGIRNDLGWYQQKPGKAPKRLIYAASTLQSGVPSRFSGSGSGTEFTLTISSLQPEDFATYYCLQHNSYPLTFGGGTKVEIK

SEQ ID NO: 279 - protein, 246 aa, Artificial Sequence
  Synthetic peptide
QVTLKESGPTLVKPTETLTLTCTLSGFSLNNARMGVSWIRQPPGKALEWLAHIFSNDEKSYSTSLKNRLTISKDSSKTQVVLTMTNVDPVDTATYYCARIVGYGSGWYGFFDYWGQGTLVTVSSGGGGSGGGGSGGGGSDIQMTQSPSSLSASVGDRVTITCRASQGIRNDLGWYQQKPGKAPKRLIYAASTLQSGVPSRFSGSGSGTEFTLTISSLQPEDFATYYCLQHNSYPLTFGGGTKVEIK

SEQ ID NO: 280 - protein, 501 aa, Artificial Sequence
  Synthetic peptide
QVTLKESGPTLVKPTETLTLTCTLSGFSLNNARMGVSWIRQPPGKALEWLAHIFSNDEKSYSTSLKNRLTISKDSSKTQVVLTMTNVDPVDTATYYCARIVGYGSGWYGFFDYWGQGTLVTVSSGGGGSGGGGSGGGGSDIQMTQSPSSLSASVGDRVTITCRASQGIRNDLGWYQQKPGKAPKRLIYAASTLQSGVPSRFSGSGSGTEFTLTISSLQPEDFATYYCLQHNSYPLTFGGGTKVEIKSGGGGSEVQLVESGGGLVQPGGSLKLSCAASGFTFNKYAMNWVRQAPGKGLEWVARIRSKYNNYATYYADSVKDRFTISRDDSKNTAYLQMNNLKTEDTAVYYCVRHGNFGNSYISYWAYWGQGTLVTVSSGGGGSGGGGSGGGGSQTVVTQEPSLTVSPGGTVTLTCGSSTGAVTSGNYPNWVQQKPGQAPRGLIGGTKFLAPGTPARFSGSLLGGKAALTLSGVQPEDEAEYYCVLWYSNRWVFGGGTKLTVL

SEQ ID NO: 281 - protein, 7 aa, Artificial Sequence
  Synthetic peptide
NARMAVS

SEQ ID NO: 282 - protein, 16 aa, Artificial Sequence
  Synthetic peptide
HIFSNDEKSYSTSLKS

SEQ ID NO: 283 - protein, 14 aa, Artificial Sequence
  Synthetic peptide
IVGYGSGWYGYFDY

SEQ ID NO: 284 - protein, 11 aa, Artificial Sequence
  Synthetic peptide
RASQDIRNDLG

SEQ ID NO: 285 - protein, 7 aa, Artificial Sequence
  Synthetic peptide
AASTLQS

SEQ ID NO: 286 - protein, 9 aa, Artificial Sequence
  Synthetic peptide
LQHNSYPLT

SEQ ID NO: 287 - protein, 124 aa, Artificial Sequence
  Synthetic peptide
QVTLKESGPALVKPTETLTLTCTLSGFSLNNARMAVSWIRQPPGKTLEWLAHIFSNDEKSYSTSLKSRLTISKDTSKGQVVLTMTNMDPVDTATYYCARIVGYGSGWYGYFDYWGQGTLVTVSS

SEQ ID NO: 288 - protein, 107 aa, Artificial Sequence
  Synthetic peptide
DIQMTQSPSSLSASVGDRVTITCRASQDIRNDLGWYQQKPGKAPKRLIYAASTLQSGVPSRFSGSGSGTEFTLTISSLQPEDFATYYCLQHNSYPLTFGGGTKVEIK

SEQ ID NO: 289 - protein, 246 aa, Artificial Sequence
  Synthetic peptide
QVTLKESGPALVKPTETLTLTCTLSGFSLNNARMAVSWIRQPPGKTLEWLAHIFSNDEKSYSTSLKSRLTISKDTSKGQVVLTMTNMDPVDTATYYCARIVGYGSGWYGYFDYWGQGTLVTVSSGGGGSGGGGSGGGGSDIQMTQSPSSLSASVGDRVTITCRASQDIRNDLGWYQQKPGKAPKRLIYAASTLQSGVPSRFSGSGSGTEFTLTISSLQPEDFATYYCLQHNSYPLTFGGGTKVEIK

SEQ ID NO: 290 - protein, 501 aa, Artificial Sequence
  Synthetic peptide
QVTLKESGPALVKPTETLTLTCTLSGFSLNNARMAVSWIRQPPGKTLEWLAHIFSNDEKSYSTSLKSRLTISKDTSKGQVVLTMTNMDPVDTATYYCARIVGYGSGWYGYFDYWGQGTLVTVSSGGGGSGGGGSGGGGSDIQMTQSPSSLSASVGDRVTITCRASQDIRNDLGWYQQKPGKAPKRLIYAASTLQSGVPSRFSGSGSGTEFTLTISSLQPEDFATYYCLQHNSYPLTFGGGTKVEIKSGGGGSEVQLVESGGGLVQPGGSLKLSCAASGFTFNKYAMNWVRQAPGKGLEWVARIRSKYNNYATYYADSVKDRFTISRDDSKNTAYLQMNNLKTEDTAVYYCVRHGNFGNSYISYWAYWGQGTLVTVSSGGGGSGGGGSGGGGSQTVVTQEPSLTVSPGGTVTLTCGSSTGAVTSGNYPNWVQQKPGQAPRGLIGGTKFLAPGTPARFSGSLLGGKAALTLSGVQPEDEAEYYCVLWYSNRWVFGGGTKLTVL

SEQ ID NO: 291 - protein, 7 aa, Artificial Sequence
  Synthetic peptide
NARMAVS

SEQ ID NO: 292 - protein, 16 aa, Artificial Sequence
  Synthetic peptide
HIFSNDEKSYSTSLKS

SEQ ID NO: 293 - protein, 14 aa, Artificial Sequence
  Synthetic peptide
IVGYGSGWYGYFDY

SEQ ID NO: 294 - protein, 11 aa, Artificial Sequence
  Synthetic peptide
RASQDIGNDLG

SEQ ID NO: 295 - protein, 7 aa, Artificial Sequence
  Synthetic peptide
AASSLQS

SEQ ID NO: 296 - protein, 9 aa, Artificial Sequence
  Synthetic peptide
LQHNSYPLT

SEQ ID NO: 297 - protein, 124 aa, Artificial Sequence; identical to SEQ ID NO: 287
  Synthetic peptide

SEQ ID NO: 298 - protein, 107 aa, Artificial Sequence
  Synthetic peptide
DIQMTQSPSSLSASVGDRVTITCRASQDIGNDLGWYQQKPGKAPKRLIYAASSLQSGVPSRFSGSGSGTEFTLTISSLQPEDFATYYCLQHNSYPLTFGGGTKVEIK

SEQ ID NO: 299 - protein, 246 aa, Artificial Sequence
  Synthetic peptide
QVTLKESGPALVKPTETLTLTCTLSGFSLNNARMAVSWIRQPPGKTLEWLAHIFSNDEKSYSTSLKSRLTISKDTSKGQVVLTMTNMDPVDTATYYCARIVGYGSGWYGYFDYWGQGTLVTVSSGGGGSGGGGSGGGGSDIQMTQSPSSLSASVGDRVTITCRASQDIGNDLGWYQQKPGKAPKRLIYAASSLQSGVPSRFSGSGSGTEFTLTISSLQPEDFATYYCLQHNSYPLTFGGGTKVEIK

SEQ ID NO: 300 - protein, 501 aa, Artificial Sequence
  Synthetic peptide
QVTLKESGPALVKPTETLTLTCTLSGFSLNNARMAVSWIRQPPGKTLEWLAHIFSNDEKSYSTSLKSRLTISKDTSKGQVVLTMTNMDPVDTATYYCARIVGYGSGWYGYFDYWGQGTLVTVSSGGGGSGGGGSGGGGSDIQMTQSPSSLSASVGDRVTITCRASQDIGNDLGWYQQKPGKAPKRLIYAASSLQSGVPSRFSGSGSGTEFTLTISSLQPEDFATYYCLQHNSYPLTFGGGTKVEIKSGGGGSEVQLVESGGGLVQPGGSLKLSCAASGFTFNKYAMNWVRQAPGKGLEWVARIRSKYNNYATYYADSVKDRFTISRDDSKNTAYLQMNNLKTEDTAVYYCVRHGNFGNSYISYWAYWGQGTLVTVSSGGGGSGGGGSGGGGSQTVVTQEPSLTVSPGGTVTLTCGSSTGAVTSGNYPNWVQQKPGQAPRGLIGGTKFLAPGTPARFSGSLLGGKAALTLSGVQPEDEAEYYCVLWYSNRWVFGGGTKLTVL

SEQ ID NO: 301 - protein, 7 aa, Artificial Sequence
  Synthetic peptide
NARMAVS

SEQ ID NO: 302 - protein, 16 aa, Artificial Sequence
  Synthetic peptide
HIFSNDEKSYSTSLKS

SEQ ID NO: 303 - protein, 14 aa, Artificial Sequence
  Synthetic peptide
IVGYGSGWYGYFDY

SEQ ID NO: 304 - protein, 11 aa, Artificial Sequence
  Synthetic peptide
RASQDIRYDLA

SEQ ID NO: 305 - protein, 7 aa, Artificial Sequence
  Synthetic peptide
AASSLQS

SEQ ID NO: 306 - protein, 9 aa, Artificial Sequence
  Synthetic peptide
LQHNFYPLT

SEQ ID NO: 307 - protein, 124 aa, Artificial Sequence
  Synthetic peptide
QVTLKESGPVLVKPTETLTLTCTVSGFSLRNARMAVSWIRQPPGKTLEWLAHIFSNDEKSYSTSLKSRLTISKDTSKSQVVLTMTNMDPVDTATYYCARIVGYGSGWYGYFDYWGQGTLVTVSS

SEQ ID NO: 308 - protein, 107 aa, Artificial Sequence
  Synthetic peptide
DIQMTQSPSSVSASVGDRVTITCRASQDIRYDLAWYQQKPGKAPKRLIYAASSLQSGVPSRFSGSGSGTEFTLTISSLQPEDFATYYCLQHNFYPLTFGGGTKVEIK

SEQ ID NO: 309 - protein, 246 aa, Artificial Sequence
  Synthetic peptide
QVTLKESGPVLVKPTETLTLTCTVSGFSLRNARMAVSWIRQPPGKTLEWLAHIFSNDEKSYSTSLKSRLTISKDTSKSQVVLTMTNMDPVDTATYYCARIVGYGSGWYGYFDYWGQGTLVTVSSGGGGSGGGGSGGGGSDIQMTQSPSSVSASVGDRVTITCRASQDIRYDLAWYQQKPGKAPKRLIYAASSLQSGVPSRFSGSGSGTEFTLTISSLQPEDFATYYCLQHNFYPLTFGGGTKVEIK

SEQ ID NO: 310 - protein, 501 aa, Artificial Sequence
  Synthetic peptide
QVTLKESGPVLVKPTETLTLTCTVSGFSLRNARMAVSWIRQPPGKTLEWLAHIFSNDEKSYSTSLKSRLTISKDTSKSQVVLTMTNMDPVDTATYYCARIVGYGSGWYGYFDYWGQGTLVTVSSGGGGSGGGGSGGGGSDIQMTQSPSSVSASVGDRVTITCRASQDIRYDLAWYQQKPGKAPKRLIYAASSLQSGVPSRFSGSGSGTEFTLTISSLQPEDFATYYCLQHNFYPLTFGGGTKVEIKSGGGGSEVQLVESGGGLVQPGGSLKLSCAASGFTFNKYAMNWVRQAPGKGLEWVARIRSKYNNYATYYADSVKDRFTISRDDSKNTAYLQMNNLKTEDTAVYYCVRHGNFGNSYISYWAYWGQGTLVTVSSGGGGSGGGGSGGGGSQTVVTQEPSLTVSPGGTVTLTCGSSTGAVTSGNYPNWVQQKPGQAPRGLIGGTKFLAPGTPARFSGSLLGGKAALTLSGVQPEDEAEYYCVLWYSNRWVFGGGTKLTVL

SEQ ID NO: 311 - protein, 7 aa, Artificial Sequence
  Synthetic peptide
NARMGVS

SEQ ID NO: 312 - protein, 16 aa, Artificial Sequence
  Synthetic peptide
NIFSNDEKSYSTSLKS

SEQ ID NO: 313 - protein, 14 aa, Artificial Sequence
  Synthetic peptide
IVGYGSGWYGYFDY

SEQ ID NO: 314 - protein, 11 aa, Artificial Sequence
  Synthetic peptide
RASQDIRNDLG

SEQ ID NO: 315 - protein, 7 aa, Artificial Sequence
  Synthetic peptide
ATSIRQS

SEQ ID NO: 316 - protein, 9 aa, Artificial Sequence
  Synthetic peptide
LQHNSFPLT

SEQ ID NO: 317 - protein, 124 aa, Artificial Sequence
  Synthetic peptide
QVTLKESGPTLVKPTETLTLTCTVSGFSLSNARMGVSWIRQPPGKALEWLANIFSNDEKSYSTSLKSRLTISKGTSKSQVVLTMTNVNPVDTGTYYCARIVGYGSGWYGYFDYWGQGTLVTVSS

SEQ ID NO: 318 - protein, 107 aa, Artificial Sequence
  Synthetic peptide
DIQMTQSPSSLSASVGDRVTITCRASQDIRNDLGWYQQKPGKAPKRLIYATSIRQSGVPSRFTGSGSGTEFTLTISGLQPEDFATYFCLQHNSFPLTFGGGTKVEIK

SEQ ID NO: 319 - protein, 246 aa, Artificial Sequence
  Synthetic peptide
QVTLKESGPTLVKPTETLTLTCTVSGFSLSNARMGVSWIRQPPGKALEWLANIFSNDEKSYSTSLKSRLTISKGTSKSQVVLTMTNVNPVDTGTYYCARIVGYGSGWYGYFDYWGQGTLVTVSSGGGGSGGGGSGGGGSDIQMTQSPSSLSASVGDRVTITCRASQDIRNDLGWYQQKPGKAPKRLIYATSIRQSGVPSRFTGSGSGTEFTLTISGLQPEDFATYFCLQHNSFPLTFGGGTKVEIK

SEQ ID NO: 320 - protein, 501 aa, Artificial Sequence
  Synthetic peptide
QVTLKESGPTLVKPTETLTLTCTVSGFSLSNARMGVSWIRQPPGKALEWLANIFSNDEKSYSTSLKSRLTISKGTSKSQVVLTMTNVNPVDTGTYYCARIVGYGSGWYGYFDYWGQGTLVTVSSGGGGSGGGGSGGGGSDIQMTQSPSSLSASVGDRVTITCRASQDIRNDLGWYQQKPGKAPKRLIYATSIRQSGVPSRFTGSGSGTEFTLTISGLQPEDFATYFCLQHNSFPLTFGGGTKVEIKSGGGGSEVQLVESGGGLVQPGGSLKLSCAASGFTFNKYAMNWVRQAPGKGLEWVARIRSKYNNYATYYADSVKDRFTISRDDSKNTAYLQMNNLKTEDTAVYYCVRHGNFGNSYISYWAYWGQGTLVTVSSGGGGSGGGGSGGGGSQTVVTQEPSLTVSPGGTVTLTCGSSTGAVTSGNYPNWVQQKPGQAPRGLIGGTKFLAPGTPARFSGSLLGGKAALTLSGVQPEDEAEYYCVLWYSNRWVFGGGTKLTVL

SEQ ID NO: 321 - protein, 7 aa, Artificial Sequence
  Synthetic peptide
NARMGVS

SEQ ID NO: 322 - protein, 16 aa, Artificial Sequence
  Synthetic peptide
HIFSNDEKSFSTSLKN

SEQ ID NO: 323 - protein, 14 aa, Artificial Sequence
  Synthetic peptide
MVGYGSGWYAYFDY

SEQ ID NO: 324 - protein, 11 aa, Artificial Sequence
  Synthetic peptide
RASQSISSYLN

SEQ ID NO: 325 - protein, 7 aa, Artificial Sequence
  Synthetic peptide
AASSLQS

SEQ ID NO: 326 - protein, 9 aa, Artificial Sequence
  Synthetic peptide
LQHNSYPLT

SEQ ID NO: 327 - protein, 124 aa, Artificial Sequence
  Synthetic peptide
QVTLKESGPVLVKPTQTLTLTCTFSGFSLSNARMGVSWIRQPPGKALEWLAHIFSNDEKSFSTSLKNRLTISKDTSKSQVVLTMTNMDPVDTATYYCARMVGYGSGWYAYFDYWGQGTQVTVSS

SEQ ID NO: 328 - protein, 107 aa, Artificial Sequence
  Synthetic peptide
DIQMTQSPSSLSASVGDRVTITCRASQSISSYLNWYQQKPGKAPKLLIYAASSLQSGVPSRFSGSGSGTDFTLTISSLQPEDFATYYCLQHNSYPLTFGGGTKVEIK

SEQ ID NO: 329 - protein, 246 aa, Artificial Sequence
  Synthetic peptide
QVTLKESGPVLVKPTQTLTLTCTFSGFSLSNARMGVSWIRQPPGKALEWLAHIFSNDEKSFSTSLKNRLTISKDTSKSQVVLTMTNMDPVDTATYYCARMVGYGSGWYAYFDYWGQGTQVTVSSGGGGSGGGGSGGGGSDIQMTQSPSSLSASVGDRVTITCRASQSISSYLNWYQQKPGKAPKLLIYAASSLQSGVPSRFSGSGSGTDFTLTISSLQPEDFATYYCLQHNSYPLTFGGGTKVEIK

SEQ ID NO: 330 - protein, 501 aa, Artificial Sequence
  Synthetic peptide
QVTLKESGPVLVKPTQTLTLTCTFSGFSLSNARMGVSWIRQPPGKALEWLAHIFSNDEKSFSTSLKNRLTISKDTSKSQVVLTMTNMDPVDTATYYCARMVGYGSGWYAYFDYWGQGTQVTVSSGGGGSGGGGSGGGGSDIQMTQSPSSLSASVGDRVTITCRASQSISSYLNWYQQKPGKAPKLLIYAASSLQSGVPSRFSGSGSGTDFTLTISSLQPEDFATYYCLQHNSYPLTFGGGTKVEIKSGGGGSEVQLVESGGGLVQPGGSLKLSCAASGFTFNKYAMNWVRQAPGKGLEWVARIRSKYNNYATYYADSVKDRFTISRDDSKNTAYLQMNNLKTEDTAVYYCVRHGNFGNSYISYWAYWGQGTLVTVSSGGGGSGGGGSGGGGSQTVVTQEPSLTVSPGGTVTLTCGSSTGAVTSGNYPNWVQQKPGQAPRGLIGGTKFLAPGTPARFSGSLLGGKAALTLSGVQPEDEAEYYCVLWYSNRWVFGGGTKLTVL

SEQ ID NO: 331 - protein, 7 aa, Artificial Sequence
  Synthetic peptide
YARMGVS

SEQ ID NO: 332 - protein, 16 aa, Artificial Sequence
  Synthetic peptide
QIFSNDEKSYSTSLKS

SEQ ID NO: 333 - protein, 14 aa, Artificial Sequence
  Synthetic peptide
IVGYGTGWYGYFDY

SEQ ID NO: 334 - protein, 11 aa, Artificial Sequence
  Synthetic peptide
RASQDIGDDLG

SEQ ID NO: 335 - protein, 7 aa, Artificial Sequence
  Synthetic peptide
AASTLQS

SEQ ID NO: 336 - protein, 9 aa, Artificial Sequence
  Synthetic peptide
LQHNSYPLT

SEQ ID NO: 337 - protein, 124 aa, Artificial Sequence
  Synthetic peptide
QVTLKESGPTLVKPTETLTLTCTVSGFSLSYARMGVSWIRQPPGKALEWLAQIFSNDEKSYSTSLKSRLTISKDTSKSQVVLTMTDMDPEDTATYYCARIVGYGTGWYGYFDYWGQGTQVTVSS

SEQ ID NO: 338 - protein, 107 aa, Artificial Sequence
  Synthetic peptide
DIQMTQSPSSLSASVGDRVTITCRASQDIGDDLGWYQQKPGKAPKRLIYAASTLQSGVPFRFSGSGSGTDFTLTISSLQPEDFATYYCLQHNSYPLTFGGGTKVEIK

SEQ ID NO: 339 - protein, 246 aa, Artificial Sequence
  Synthetic peptide
QVTLKESGPTLVKPTETLTLTCTVSGFSLSYARMGVSWIRQPPGKALEWLAQIFSNDEKSYSTSLKSRLTISKDTSKSQVVLTMTDMDPEDTATYYCARIVGYGTGWYGYFDYWGQGTQVTVSSGGGGSGGGGSGGGGSDIQMTQSPSSLSASVGDRVTITCRASQDIGDDLGWYQQKPGKAPKRLIYAASTLQSGVPFRFSGSGSGTDFTLTISSLQPEDFATYYCLQHNSYPLTFGGGTKVEIK

SEQ ID NO: 340 - protein, 501 aa, Artificial Sequence
  Synthetic peptide
QVTLKESGPTLVKPTETLTLTCTVSGFSLSYARMGVSWIRQPPGKALEWLAQIFSNDEKSYSTSLKSRLTISKDTSKSQVVLTMTDMDPEDTATYYCARIVGYGTGWYGYFDYWGQGTQVTVSSGGGGSGGGGSGGGGSDIQMTQSPSSLSASVGDRVTITCRASQDIGDDLGWYQQKPGKAPKRLIYAASTLQSGVPFRFSGSGSGTDFTLTISSLQPEDFATYYCLQHNSYPLTFGGGTKVEIKSGGGGSEVQLVESGGGLVQPGGSLKLSCAASGFTFNKYAMNWVRQAPGKGLEWVARIRSKYNNYATYYADSVKDRFTISRDDSKNTAYLQMNNLKTEDTAVYYCVRHGNFGNSYISYWAYWGQGTLVTVSSGGGGSGGGGSGGGGSQTVVTQEPSLTVSPGGTVTLTCGSSTGAVTSGNYPNWVQQKPGQAPRGLIGGTKFLAPGTPARFSGSLLGGKAALTLSGVQPEDEAEYYCVLWYSNRWVFGGGTKLTVL

SEQ ID NO: 341 - protein, 7 aa, Artificial Sequence
  Synthetic peptide
NARMAVS

SEQ ID NO: 342 - protein, 16 aa, Artificial Sequence
  Synthetic peptide
HIFSNDEKSYSTSLKS

SEQ ID NO: 343 - protein, 14 aa, Artificial Sequence
  Synthetic peptide
IVGYGTGWYGFFDY

SEQ ID NO: 344 - protein, 11 aa, Artificial Sequence
  Synthetic peptide
RASQGIRNDLA

SEQ ID NO: 345 - protein, 7 aa, Artificial Sequence
  Synthetic peptide
AASSLQS

SEQ ID NO: 346 - protein, 9 aa, Artificial Sequence
  Synthetic peptide
LQHNSYPLT

SEQ ID NO: 347 - protein, 124 aa, Artificial Sequence
  Synthetic peptide
QVTLKESGPALVKPTETLTLTCTLSGFSLNNARMAVSWIRQPPGKTLEWLAHIFSNDEKSYSTSLKSRLTISKDTSKSQVVLTMTNMDPEDTATYYCARIVGYGTGWYGFFDYWGQGILVTVSS

SEQ ID NO: 348 - protein, 107 aa, Artificial Sequence
  Synthetic peptide
DIQMTQSPSSLSASVGDRVTITCRASQGIRNDLAWYQQKPGKAPKRLIYAASSLQSGVPSRFSGSGSGTEFTLTISSLQPEDFATYYCLQHNSYPLTFGGGTKVEIK

SEQ ID NO: 349 - protein, 246 aa, Artificial Sequence
  Synthetic peptide
QVTLKESGPALVKPTETLTLTCTLSGFSLNNARMAVSWIRQPPGKTLEWLAHIFSNDEKSYSTSLKSRLTISKDTSKSQVVLTMTNMDPEDTATYYCARIVGYGTGWYGFFDYWGQGILVTVSSGGGGSGGGGSGGGGSDIQMTQSPSSLSASVGDRVTITCRASQGIRNDLAWYQQKPGKAPKRLIYAASSLQSGVPSRFSGSGSGTEFTLTISSLQPEDFATYYCLQHNSYPLTFGGGTKVEIK

SEQ ID NO: 350 - protein, 501 aa, Artificial Sequence
  Synthetic peptide
QVTLKESGPALVKPTETLTLTCTLSGFSLNNARMAVSWIRQPPGKTLEWLAHIFSNDEKSYSTSLKSRLTISKDTSKSQVVLTMTNMDPEDTATYYCARIVGYGTGWYGFFDYWGQGILVTVSSGGGGSGGGGSGGGGSDIQMTQSPSSLSASVGDRVTITCRASQGIRNDLAWYQQKPGKAPKRLIYAASSLQSGVPSRFSGSGSGTEFTLTISSLQPEDFATYYCLQHNSYPLTFGGGTKVEIKSGGGGSEVQLVESGGGLVQPGGSLKLSCAASGFTFNKYAMNWVRQAPGKGLEWVARIRSKYNNYATYYADSVKDRFTISRDDSKNTAYLQMNNLKTEDTAVYYCVRHGNFGNSYISYWAYWGQGTLVTVSSGGGGSGGGGSGGGGSQTVVTQEPSLTVSPGGTVTLTCGSSTGAVTSGNYPNWVQQKPGQAPRGLIGGTKFLAPGTPARFSGSLLGGKAALTLSGVQPEDEAEYYCVLWYSNRWVFGGGTKLTVL

SEQ ID NO: 351 - protein, 7 aa, Artificial Sequence
  Synthetic peptide
NARMGVS

SEQ ID NO: 352 - protein, 16 aa, Artificial Sequence
  Synthetic peptide
HIFSNDEKSYSTSLKS

SEQ ID NO: 353 - protein, 17 aa, Artificial Sequence
  Synthetic peptide
IPGYGGNFYYHYYGMDV

SEQ ID NO: 354 - protein, 11 aa, Artificial Sequence
  Synthetic peptide
RTSRGIRNDLG

SEQ ID NO: 355 - protein, 7 aa, Artificial Sequence
  Synthetic peptide
AASTLQS

SEQ ID NO: 356 - protein, 9 aa, Artificial Sequence
  Synthetic peptide
LQHNNFPWT

SEQ ID NO: 357 - protein, 127 aa, Artificial Sequence
  Synthetic peptide
QVTLKESGPALVKPTETLTLTCTFSGFSLSNARMGVSWIRQPPGKALEWLAHIFSNDEKSYSTSLKSRLTISKDTSKSQVVLTMTNMDPVDTATYYCARIPGYGGNFYYHYYGMDVWGQGTTVTVSS

SEQ ID NO: 358 - protein, 107 aa, Artificial Sequence
  Synthetic peptide
DIQMTQSPSSLSASVGDRVTITCRTSRGIRNDLGWYQQIPGRAPKRLIYAASTLQSGVPSRFSGSGSGTEFTLTISSLQPEDFATYYCLQHNNFPWTFGQGTKVEIK

SEQ ID NO: 359 - protein, 249 aa, Artificial Sequence
  Synthetic peptide
QVTLKESGPALVKPTETLTLTCTFSGFSLSNARMGVSWIRQPPGKALEWLAHIFSNDEKSYSTSLKSRLTISKDTSKSQVVLTMTNMDPVDTATYYCARIPGYGGNFYYHYYGMDVWGQGTTVTVSSGGGGSGGGGSGGGGSDIQMTQSPSSLSASVGDRVTITCRTSRGIRNDLGWYQQIPGRAPKRLIYAASTLQSGVPSRFSGSGSGTEFTLTISSLQPEDFATYYCLQHNNFPWTFGQGTKVEIK

SEQ ID NO: 360 - protein, 504 aa, Artificial Sequence
  Synthetic peptide
QVTLKESGPALVKPTETLTLTCTFSGFSLSNARMGVSWIRQPPGKALEWLAHIFSNDEKSYSTSLKSRLTISKDTSKSQVVLTMTNMDPVDTATYYCARIPGYGGNFYYHYYGMDVWGQGTTVTVSSGGGGSGGGGSGGGGSDIQMTQSPSSLSASVGDRVTITCRTSRGIRNDLGWYQQIPGRAPKRLIYAASTLQSGVPSRFSGSGSGTEFTLTISSLQPEDFATYYCLQHNNFPWTFGQGTKVEIKSGGGGSEVQLVESGGGLVQPGGSLKLSCAASGFTFNKYAMNWVRQAPGKGLEWVARIRSKYNNYATYYADSVKDRFTISRDDSKNTAYLQMNNLKTEDTAVYYCVRHGNFGNSYISYWAYWGQGTLVTVSSGGGGSGGGGSGGGGSQTVVTQEPSLTVSPGGTVTLTCGSSTGAVTSGNYPNWVQQKPGQAPRGLIGGTKFLAPGTPARFSGSLLGGKAALTLSGVQPEDEAEYYCVLWYSNRWVFGGGTKLTVL

SEQ ID NO: 361 - protein, 7 aa, Artificial Sequence
  Synthetic peptide
NARMGVS

SEQ ID NO: 362 - protein, 16 aa, Artificial Sequence
  Synthetic peptide
HIFSNDEKSYSTSLKS

SEQ ID NO: 363 - protein, 14 aa, Artificial Sequence
  Synthetic peptide
MPEYSSGWSGAFDI

SEQ ID NO: 364 - protein, 11 aa, Artificial Sequence
  Synthetic peptide
RASQGISNYLA

SEQ ID NO: 365 - protein, 7 aa, Artificial Sequence
  Synthetic peptide
AASTLQS

SEQ ID NO: 366 - protein, 9 aa, Artificial Sequence
  Synthetic peptide
LQHNTYPWT

SEQ ID NO: 367 - protein, 124 aa, Artificial Sequence; identical to SEQ ID NO: 247
  Synthetic peptide

SEQ ID NO: 368 - protein, 107 aa, Artificial Sequence
  Synthetic peptide
DIQMTQSPSSLSASVGDRVTITCRASQGISNYLAWYQQKPGKAPKRLIYAASTLQSGVPSRFSGSGSGTEFTLTISSLQPEDFATYYCLQHNTYPWTFGQGTKVEIK

SEQ ID NO: 369 - protein, 246 aa, Artificial Sequence
  Synthetic peptide
QVTLKESGPVLVKPTETLTLTCTVSGFSFRNARMGVSWIRQPPGKALEWLAHIFSNDEKSYSTSLKSRLTISKDTSKSQVVLTLTNMDPVDTATYFCARMPEYSSGWSGAFDIWGQGTMVTVSSGGGGSGGGGSGGGGSDIQMTQSPSSLSASVGDRVTITCRASQGISNYLAWYQQKPGKAPKRLIYAASTLQSGVPSRFSGSGSGTEFTLTISSLQPEDFATYYCLQHNTYPWTFGQGTKVEIK

SEQ ID NO: 370 - protein, 501 aa, Artificial Sequence
  Synthetic peptide
QVTLKESGPVLVKPTETLTLTCTVSGFSFRNARMGVSWIRQPPGKALEWLAHIFSNDEKSYSTSLKSRLTISKDTSKSQVVLTLTNMDPVDTATYFCARMPEYSSGWSGAFDIWGQGTMVTVSSGGGGSGGGGSGGGGSDIQMTQSPSSLSASVGDRVTITCRASQGISNYLAWYQQKPGKAPKRLIYAASTLQSGVPSRFSGSGSGTEFTLTISSLQPEDFATYYCLQHNTYPWTFGQGTKVEIKSGGGGSEVQLVESGGGLVQPGGSLKLSCAASGFTFNKYAMNWVRQAPGKGLEWVARIRSKYNNYATYYADSVKDRFTISRDDSKNTAYLQMNNLKTEDTAVYYCVRHGNFGNSYISYWAYWGQGTLVTVSSGGGGSGGGGSGGGGSQTVVTQEPSLTVSPGGTVTLTCGSSTGAVTSGNYPNWVQQKPGQAPRGLIGGTKFLAPGTPARFSGSLLGGKAALTLSGVQPEDEAEYYCVLWYSNRWVFGGGTKLTVL

SEQ ID NO: 371 - protein, 7 aa, Artificial Sequence
  Synthetic peptide
NARMGVS

SEQ ID NO: 372 - protein, 16 aa, Artificial Sequence
  Synthetic peptide
HIFSNDEKSYSTSLKS

SEQ ID NO: 373 - protein, 14 aa, Artificial Sequence
  Synthetic peptide
MPEYSSGWSGAFDI

SEQ ID NO: 374 - protein, 11 aa, Artificial Sequence
  Synthetic peptide
RASQDIGYDLG

SEQ ID NO: 375 - protein, 7 aa, Artificial Sequence
  Synthetic peptide
AASTLQS

SEQ ID NO: 376 - protein, 9 aa, Artificial Sequence
  Synthetic peptide
LQHNSFPWT

SEQ ID NO: 377 - protein, 124 aa, Artificial Sequence
  Synthetic peptide
QVTLKESGPALVKPTETLTLTCTVSGFSFRNARMGVSWIRQPPGKALEWLAHIFSNDEKSYSTSLKSRLTISKDTSKSQVVLTLTNMDPVDTATYFCARMPEYSSGWSGAFDIWGQGTMVTVSS

SEQ ID NO: 378 - protein, 107 aa, Artificial Sequence
  Synthetic peptide
DIQMTQSPSSLSASVGDRVTITCRASQDIGYDLGWYQQKPGKAPKRLIYAASTLQSGVPSRFSGSGSGTEFTLIISSLQPEDFATYYCLQHNSFPWTFGQGTKVEIK

SEQ ID NO: 379 - protein, 246 aa, Artificial Sequence
  Synthetic peptide
QVTLKESGPALVKPTETLTLTCTVSGFSFRNARMGVSWIRQPPGKALEWLAHIFSNDEKSYSTSLKSRLTISKDTSKSQVVLTLTNMDPVDTATYFCARMPEYSSGWSGAFDIWGQGTMVTVSSGGGGSGGGGSGGGGSDIQMTQSPSSLSASVGDRVTITCRASQDIGYDLGWYQQKPGKAPKRLIYAASTLQSGVPSRFSGSGSGTEFTLIISSLQPEDFATYYCLQHNSFPWTFGQGTKVEIK

SEQ ID NO: 380 - protein, 501 aa, Artificial Sequence
  Synthetic peptide
QVTLKESGPALVKPTETLTLTCTVSGFSFRNARMGVSWIRQPPGKALEWLAHIFSNDEKSYSTSLKSRLTISKDTSKSQVVLTLTNMDPVDTATYFCARMPEYSSGWSGAFDIWGQGTMVTVSSGGGGSGGGGSGGGGSDIQMTQSPSSLSASVGDRVTITCRASQDIGYDLGWYQQKPGKAPKRLIYAASTLQSGVPSRFSGSGSGTEFTLIISSLQPEDFATYYCLQHNSFPWTFGQGTKVEIKSGGGGSEVQLVESGGGLVQPGGSLKLSCAASGFTFNKYAMNWVRQAPGKGLEWVARIRSKYNNYATYYADSVKDRFTISRDDSKNTAYLQMNNLKTEDTAVYYCVRHGNFGNSYISYWAYWGQGTLVTVSSGGGGSGGGGSGGGGSQTVVTQEPSLTVSPGGTVTLTCGSSTGAVTSGNYPNWVQQKPGQAPRGLIGGTKFLAPGTPARFSGSLLGGKAALTLSGVQPEDEAEYYCVLWYSNRWVFGGGTKLTVL

SEQ ID NO: 381 - protein, 7 aa, Artificial Sequence
  Synthetic peptide
NVRMGVS

SEQ ID NO: 382 - protein, 16 aa, Artificial Sequence
  Synthetic peptide
HIFSNDEKSYSTSLKS

SEQ ID NO: 383 - protein, 14 aa, Artificial Sequence
  Synthetic peptide
MPEYSSGWSGAFDI

SEQ ID NO: 384 - protein, 11 aa, Artificial Sequence
  Synthetic peptide
RASQDIRDDLV

SEQ ID NO: 385 - protein, 7 aa, Artificial Sequence
  Synthetic peptide
AASTLQS

SEQ ID NO: 386 - protein, 9 aa, Artificial Sequence
  Synthetic peptide
LQHHSYPWT

SEQ ID NO: 387 - protein, 124 aa, Artificial Sequence
  Synthetic peptide
QVTLKESGPALVKPTETLTLTCTVSGFSLRNVRMGVSWIRQPPGKALEWLAHIFSNDEKSYSTSLKSRLTISKDTSKSQVVLILTNMDPVDTATYFCARMPEYSSGWSGAFDIWGQGTMVTVSS

SEQ ID NO: 388 - protein, 107 aa, Artificial Sequence
  Synthetic peptide
DIQMTQSPSSLSASVGDRVTITCRASQDIRDDLVWYQQKPGKAPKRLIYAASTLQSGVPSRFSGSGSGTEFTLTISSLQPEDFATYYCLQHHSYPWTFGQGTKVEIK

SEQ ID NO: 389 - protein, 246 aa, Artificial Sequence
  Synthetic peptide
QVTLKESGPALVKPTETLTLTCTVSGFSLRNVRMGVSWIRQPPGKALEWLAHIFSNDEKSYSTSLKSRLTISKDTSKSQVVLILTNMDPVDTATYFCARMPEYSSGWSGAFDIWGQGTMVTVSSGGGGSGGGGSGGGGSDIQMTQSPSSLSASVGDRVTITCRASQDIRDDLVWYQQKPGKAPKRLIYAASTLQSGVPSRFSGSGSGTEFTLTISSLQPEDFATYYCLQHHSYPWTFGQGTKVEIK

SEQ ID NO: 390 - protein, 501 aa, Artificial Sequence
  Synthetic peptide
QVTLKESGPALVKPTETLTLTCTVSGFSLRNVRMGVSWIRQPPGKALEWLAHIFSNDEKSYSTSLKSRLTISKDTSKSQVVLILTNMDPVDTATYFCARMPEYSSGWSGAFDIWGQGTMVTVSSGGGGSGGGGSGGGGSDIQMTQSPSSLSASVGDRVTITCRASQDIRDDLVWYQQKPGKAPKRLIYAASTLQSGVPSRFSGSGSGTEFTLTISSLQPEDFATYYCLQHHSYPWTFGQGTKVEIKSGGGGSEVQLVESGGGLVQPGGSLKLSCAASGFTFNKYAMNWVRQAPGKGLEWVARIRSKYNNYATYYADSVKDRFTISRDDSKNTAYLQMNNLKTEDTAVYYCVRHGNFGNSYISYWAYWGQGTLVTVSSGGGGSGGGGSGGGGSQTVVTQEPSLTVSPGGTVTLTCGSSTGAVTSGNYPNWVQQKPGQAPRGLIGGTKFLAPGTPARFSGSLLGGKAALTLSGVQPEDEAEYYCVLWYSNRWVFGGGTKLTVL

SEQ ID NO: 391 - protein, 7 aa, Artificial Sequence
  Synthetic peptide
NARMGVS

SEQ ID NO: 392 - protein, 16 aa, Artificial Sequence
  Synthetic peptide
HIFSNDEKSYSTSLKS

SEQ ID NO: 393 - protein, 14 aa, Artificial Sequence
  Synthetic peptide
MPEYSSGWSGAFDI

SEQ ID NO: 394 - protein, 11 aa, Artificial Sequence
  Synthetic peptide
RASQDIRDDLG

SEQ ID NO: 395 - protein, 7 aa, Artificial Sequence
  Synthetic peptide
AASTLQS

SEQ ID NO: 396 - protein, 9 aa, Artificial Sequence
  Synthetic peptide
LQHNSFPFT

SEQ ID NO: 397 - protein, 124 aa, Artificial Sequence; identical to SEQ ID NO: 377
  Synthetic peptide

SEQ ID NO: 398 - protein, 107 aa, Artificial Sequence
  Synthetic peptide
DIQMTQSPSSLSASVGDRVTITCRASQDIRDDLGWYQQKPGKAPKRLIYAASTLQSGVPSRFTGGGSGTEFTLTISSLQPEDFATYYCLQHNSFPFTFGGGTKVEIK

SEQ ID NO: 399 - protein, 246 aa, Artificial Sequence
  Synthetic peptide
QVTLKESGPALVKPTETLTLTCTVSGFSFRNARMGVSWIRQPPGKALEWLAHIFSNDEKSYSTSLKSRLTISKDTSKSQVVLTLTNMDPVDTATYFCARMPEYSSGWSGAFDIWGQGTMVTVSSGGGGSGGGGSGGGGSDIQMTQSPSSLSASVGDRVTITCRASQDIRDDLGWYQQKPGKAPKRLIYAASTLQSGVPSRFTGGGSGTEFTLTISSLQPEDFATYYCLQHNSFPFTFGGGTKVEIK

SEQ ID NO: 400 - protein, 501 aa, Artificial Sequence
  Synthetic peptide
QVTLKESGPALVKPTETLTLTCTVSGFSFRNARMGVSWIRQPPGKALEWLAHIFSNDEKSYSTSLKSRLTISKDTSKSQVVLTLTNMDPVDTATYFCARMPEYSSGWSGAFDIWGQGTMVTVSSGGGGSGGGGSGGGGSDIQMTQSPSSLSASVGDRVTITCRASQDIRDDLGWYQQKPGKAPKRLIYAASTLQSGVPSRFTGGGSGTEFTLTISSLQPEDFATYYCLQHNSFPFTFGGGTKVEIKSGGGGSEVQLVESGGGLVQPGGSLKLSCAASGFTFNKYAMNWVRQAPGKGLEWVARIRSKYNNYATYYADSVKDRFTISRDDSKNTAYLQMNNLKTEDTAVYYCVRHGNFGNSYISYWAYWGQGTLVTVSSGGGGSGGGGSGGGGSQTVVTQEPSLTVSPGGTVTLTCGSSTGAVTSGNYPNWVQQKPGQAPRGLIGGTKFLAPGTPARFSGSLLGGKAALTLSGVQPEDEAEYYCVLWYSNRWVFGGGTKLTVL

SEQ ID NO: 401 - protein, 7 aa, Artificial Sequence
  Synthetic peptide
NARMGVS

SEQ ID NO: 402 - protein, 16 aa, Artificial Sequence
  Synthetic peptide
HIFSNDEKSYSTSLKS

SEQ ID NO: 403 - protein, 14 aa, Artificial Sequence
  Synthetic peptide
MPEYSSGWSGAFDI

SEQ ID NO: 404 - protein, 11 aa, Artificial Sequence
  Synthetic peptide
RASQGIRNDLV

SEQ ID NO: 405 - protein, 7 aa, Artificial Sequence
  Synthetic peptide
GTSTLQS

SEQ ID NO: 406 - protein, 9 aa, Artificial Sequence
  Synthetic peptide
LQHNSYPLT

SEQ ID NO: 407 - protein, 124 aa, Artificial Sequence; identical to SEQ ID NO: 247
  Synthetic peptide

SEQ ID NO: 408 - protein, 107 aa, Artificial Sequence
  Synthetic peptide
DIQMTQSPSSLSASVGDRVTITCRASQGIRNDLVWYQQKPGKAPKRLIYGTSTLQSGVPSRFSGSGSGTEFTLTISSLQPEDFATYYCLQHNSYPLTFGGGTKVEIK

SEQ ID NO: 409 - protein, 246 aa, Artificial Sequence
  Synthetic peptide
QVTLKESGPVLVKPTETLTLTCTVSGFSFRNARMGVSWIRQPPGKALEWLAHIFSNDEKSYSTSLKSRLTISKDTSKSQVVLTLTNMDPVDTATYFCARMPEYSSGWSGAFDIWGQGTMVTVSSGGGGSGGGGSGGGGSDIQMTQSPSSLSASVGDRVTITCRASQGIRNDLVWYQQKPGKAPKRLIYGTSTLQSGVPSRFSGSGSGTEFTLTISSLQPEDFATYYCLQHNSYPLTFGGGTKVEIK

SEQ ID NO: 410 - protein, 501 aa, Artificial Sequence
  Synthetic peptide
QVTLKESGPVLVKPTETLTLTCTVSGFSFRNARMGVSWIRQPPGKALEWLAHIFSNDEKSYSTSLKSRLTISKDTSKSQVVLTLTNMDPVDTATYFCARMPEYSSGWSGAFDIWGQGTMVTVSSGGGGSGGGGSGGGGSDIQMTQSPSSLSASVGDRVTITCRASQGIRNDLVWYQQKPGKAPKRLIYGTSTLQSGVPSRFSGSGSGTEFTLTISSLQPEDFATYYCLQHNSYPLTFGGGTKVEIKSGGGGSEVQLVESGGGLVQPGGSLKLSCAASGFTFNKYAMNWVRQAPGKGLEWVARIRSKYNNYATYYADSVKDRFTISRDDSKNTAYLQMNNLKTEDTAVYYCVRHGNFGNSYISYWAYWGQGTLVTVSSGGGGSGGGGSGGGGSQTVVTQEPSLTVSPGGTVTLTCGSSTGAVTSGNYPNWVQQKPGQAPRGLIGGTKFLAPGTPARFSGSLLGGKAALTLSGVQPEDEAEYYCVLWYSNRWVFGGGTKLTVL

SEQ ID NO: 411 - protein, 7 aa, Artificial Sequence
  Synthetic peptide
NARMGVS

SEQ ID NO: 412 - protein, 16 aa, Artificial Sequence
  Synthetic peptide
HIFSNDEKSYSTSLKS

SEQ ID NO: 413 - protein, 14 aa, Artificial Sequence
  Synthetic peptide
MPEYSSGWSGAFDI

SEQ ID NO: 414 - protein, 11 aa, Artificial Sequence
  Synthetic peptide
RTSQGIRNDLV

SEQ ID NO: 415 - protein, 7 aa, Artificial Sequence
  Synthetic peptide
AASTLQS

SEQ ID NO: 416 - protein, 9 aa, Artificial Sequence
  Synthetic peptide
LQHYSYPLT

SEQ ID NO: 417 - protein, 124 aa, Artificial Sequence; identical to SEQ ID NO: 247
  Synthetic peptide

SEQ ID NO: 418 - protein, 107 aa, Artificial Sequence
  Synthetic peptide
DIQMTQSPSSLSASVGDRVTITCRTSQGIRNDLVWYQQKPGKAPKRLIYAASTLQSGVPSRFSGSGSGTEFTLTISSLQPEDFATYFCLQHYSYPLTFGGGTKVEIK

SEQ ID NO: 419 - protein, 246 aa, Artificial Sequence
  Synthetic peptide
QVTLKESGPVLVKPTETLTLTCTVSGFSFRNARMGVSWIRQPPGKALEWLAHIFSNDEKSYSTSLKSRLTISKDTSKSQVVLTLTNMDPVDTATYFCARMPEYSSGWSGAFDIWGQGTMVTVSSGGGGSGGGGSGGGGSDIQMTQSPSSLSASVGDRVTITCRTSQGIRNDLVWYQQKPGKAPKRLIYAASTLQSGVPSRFSGSGSGTEFTLTISSLQPEDFATYFCLQHYSYPLTFGGGTKVEIK

SEQ ID NO: 420 - protein, 501 aa, Artificial Sequence
  Synthetic peptide
QVTLKESGPVLVKPTETLTLTCTVSGFSFRNARMGVSWIRQPPGKALEWLAHIFSNDEKSYSTSLKSRLTISKDTSKSQVVLTLTNMDPVDTATYFCARMPEYSSGWSGAFDIWGQGTMVTVSSGGGGSGGGGSGGGGSDIQMTQSPSSLSASVGDRVTITCRTSQGIRNDLVWYQQKPGKAPKRLIYAASTLQSGVPSRFSGSGSGTEFTLTISSLQPEDFATYFCLQHYSYPLTFGGGTKVEIKSGGGGSEVQLVESGGGLVQPGGSLKLSCAASGFTFNKYAMNWVRQAPGKGLEWVARIRSKYNNYATYYADSVKDRFTISRDDSKNTAYLQMNNLKTEDTAVYYCVRHGNFGNSYISYWAYWGQGTLVTVSSGGGGSGGGGSGGGGSQTVVTQEPSLTVSPGGTVTLTCGSSTGAVTSGNYPNWVQQKPGQAPRGLIGGTKFLAPGTPARFSGSLLGGKAALTLSGVQPEDEAEYYCVLWYSNRWVFGGGTKLTVL

SEQ ID NO: 421 - protein, 7 aa, Artificial Sequence
  Synthetic peptide
NARMGVS

SEQ ID NO: 422 - protein, 16 aa, Artificial Sequence
  Synthetic peptide
HIFSNDEKSYSTSLKS

SEQ ID NO: 423 - protein, 14 aa, Artificial Sequence
  Synthetic peptide
MPEYSSGWSGAFDI

SEQ ID NO: 424 - protein, 11 aa, Artificial Sequence
  Synthetic peptide
RASQGIGDDLG

SEQ ID NO: 425 - protein, 7 aa, Artificial Sequence
  Synthetic peptide
ATSVLQS

SEQ ID NO: 426 - protein, 9 aa, Artificial Sequence
  Synthetic peptide
LQHNSYPLT

SEQ ID NO: 427 - protein, 124 aa, Artificial Sequence; identical to SEQ ID NO: 247
  Synthetic peptide

SEQ ID NO: 428 - protein, 107 aa, Artificial Sequence
  Synthetic peptide
DIQMTQSPSSLSASVGDRVTITCRASQGIGDDLGWYQQIPGKAPKRLIYATSVLQSGVPSRFSGSGSGTEFTLTISSLQPEDFATYYCLQHNSYPLTFGGGTKVEIK

SEQ ID NO: 429 - protein, 246 aa, Artificial Sequence
  Synthetic peptide
QVTLKESGPVLVKPTETLTLTCTVSGFSFRNARMGVSWIRQPPGKALEWLAHIFSNDEKSYSTSLKSRLTISKDTSKSQVVLTLTNMDPVDTATYFCARMPEYSSGWSGAFDIWGQGTMVTVSSGGGGSGGGGSGGGGSDIQMTQSPSSLSASVGDRVTITCRASQGIGDDLGWYQQIPGKAPKRLIYATSVLQSGVPSRFSGSGSGTEFTLTISSLQPEDFATYYCLQHNSYPLTFGGGTKVEIK

SEQ ID NO: 430 - protein, 501 aa, Artificial Sequence
  Synthetic peptide
QVTLKESGPVLVKPTETLTLTCTVSGFSFRNARMGVSWIRQPPGKALEWLAHIFSNDEKSYSTSLKSRLTISKDTSKSQVVLTLTNMDPVDTATYFCARMPEYSSGWSGAFDIWGQGTMVTVSSGGGGSGGGGSGGGGSDIQMTQSPSSLSASVGDRVTITCRASQGIGDDLGWYQQIPGKAPKRLIYATSVLQSGVPSRFSGSGSGTEFTLTISSLQPEDFATYYCLQHNSYPLTFGGGTKVEIKSGGGGSEVQLVESGGGLVQPGGSLKLSCAASGFTFNKYAMNWVRQAPGKGLEWVARIRSKYNNYATYYADSVKDRFTISRDDSKNTAYLQMNNLKTEDTAVYYCVRHGNFGNSYISYWAYWGQGTLVTVSSGGGGSGGGGSGGGGSQTVVTQEPSLTVSPGGTVTLTCGSSTGAVTSGNYPNWVQQKPGQAPRGLIGGTKFLAPGTPARFSGSLLGGKAALTLSGVQPEDEAEYYCVLWYSNRWVFGGGTKLTVL

SEQ ID NO: 431 - protein, 7 aa, Artificial Sequence
  Synthetic peptide
NARMGVS

SEQ ID NO: 432 - protein, 16 aa, Artificial Sequence
  Synthetic peptide
HIFSNDEKSYRTSLKS

SEQ ID NO: 433 - protein, 14 aa, Artificial Sequence
  Synthetic peptide
IVGYGSGWYAYFDY

SEQ ID NO: 434 - protein, 11 aa, Artificial Sequence
  Synthetic peptide
RASQGIRNDLG

SEQ ID NO: 435 - protein, 7 aa, Artificial Sequence
  Synthetic peptide
AASSLQS

SEQ ID NO: 436 - protein, 9 aa, Artificial Sequence
  Synthetic peptide
LQHNSYPLT

SEQ ID NO: 437 - protein, 124 aa, Artificial Sequence
  Synthetic peptide
QVTLKESGPALVKPTQTLTLTCTFSGFSLSNARMGVSWIRQPPGKALEWLAHIFSNDEKSYRTSLKSRLTISKDTSKSQVVLTMTNMDPVDTATYYCARIVGYGSGWYAYFDYWGQGTLVTVSS

SEQ ID NO: 438 - protein, 107 aa, Artificial Sequence
  Synthetic peptide
DIQMTQSPSSLSASVGDRVTITCRASQGIRNDLGWYQQKPGKAPKRLIYAASSLQSGVPSRFSGSGSGTEFTLTISSLQPEDFATYYCLQHNSYPLTFGGGTKVEIK

SEQ ID NO: 439 - protein, 246 aa, Artificial Sequence
  Synthetic peptide
QVTLKESGPALVKPTQTLTLTCTFSGFSLSNARMGVSWIRQPPGKALEWLAHIFSNDEKSYRTSLKSRLTISKDTSKSQVVLTMTNMDPVDTATYYCARIVGYGSGWYAYFDYWGQGTLVTVSSGGGGSGGGGSGGGGSDIQMTQSPSSLSASVGDRVTITCRASQGIRNDLGWYQQKPGKAPKRLIYAASSLQSGVPSRFSGSGSGTEFTLTISSLQPEDFATYYCLQHNSYPLTFGGGTKVEIK

SEQ ID NO: 440 - protein, 501 aa, Artificial Sequence
  Synthetic peptide
QVTLKESGPALVKPTQTLTLTCTFSGFSLSNARMGVSWIRQPPGKALEWLAHIFSNDEKSYRTSLKSRLTISKDTSKSQVVLTMTNMDPVDTATYYCARIVGYGSGWYAYFDYWGQGTLVTVSSGGGGSGGGGSGGGGSDIQMTQSPSSLSASVGDRVTITCRASQGIRNDLGWYQQKPGKAPKRLIYAASSLQSGVPSRFSGSGSGTEFTLTISSLQPEDFATYYCLQHNSYPLTFGGGTKVEIKSGGGGSEVQLVESGGGLVQPGGSLKLSCAASGFTFNKYAMNWVRQAPGKGLEWVARIRSKYNNYATYYADSVKDRFTISRDDSKNTAYLQMNNLKTEDTAVYYCVRHGNFGNSYISYWAYWGQGTLVTVSSGGGGSGGGGSGGGGSQTVVTQEPSLTVSPGGTVTLTCGSSTGAVTSGNYPNWVQQKPGQAPRGLIGGTKFLAPGTPARFSGSLLGGKAALTLSGVQPEDEAEYYCVLWYSNRWVFGGGTKLTVL

SEQ ID NO: 441 - protein, 7 aa, Artificial Sequence
  Synthetic peptide
NARMGVS

SEQ ID NO: 442 - protein, 16 aa, Artificial Sequence
  Synthetic peptide
LIYWNDDKRYSPSLKS

SEQ ID NO: 443 - protein, 14 aa, Artificial Sequence
  Synthetic peptide
MVGYGSGWYAYFDY

SEQ ID NO: 444 - protein, 11 aa, Artificial Sequence
  Synthetic peptide
RASQGIRNDLG

SEQ ID NO: 445 - protein, 7 aa, Artificial Sequence
  Synthetic peptide
AASSLQS

SEQ ID NO: 446 - protein, 9 aa, Artificial Sequence
  Synthetic peptide
LQHNSYPLT

SEQ ID NO: 447 - protein, 124 aa, Artificial Sequence
  Synthetic peptide
QVTLKESGPVLVKPTQTLTLTCTFSGFSLSNARMGVSWIRQPPGKALEWLALIYWNDDKRYSPSLKSRLTITKDTSKNQVVLTMTNMDPVDTATYYCARMVGYGSGWYAYFDYWGQGTLVTVSS

SEQ ID NO: 448 - protein, 107 aa, Artificial Sequence; identical to SEQ ID NO: 438
  Synthetic peptide

SEQ ID NO: 449 - protein, 246 aa, Artificial Sequence
  Synthetic peptide
QVTLKESGPVLVKPTQTLTLTCTFSGFSLSNARMGVSWIRQPPGKALEWLALIYWNDDKRYSPSLKSRLTITKDTSKNQVVLTMTNMDPVDTATYYCARMVGYGSGWYAYFDYWGQGTLVTVSSGGGGSGGGGSGGGGSDIQMTQSPSSLSASVGDRVTITCRASQGIRNDLGWYQQKPGKAPKRLIYAASSLQSGVPSRFSGSGSGTEFTLTISSLQPEDFATYYCLQHNSYPLTFGGGTKVEIK

SEQ ID NO: 450 - protein, 501 aa, Artificial Sequence
  Synthetic peptide
QVTLKESGPVLVKPTQTLTLTCTFSGFSLSNARMGVSWIRQPPGKALEWLALIYWNDDKRYSPSLKSRLTITKDTSKNQVVLTMTNMDPVDTATYYCARMVGYGSGWYAYFDYWGQGTLVTVSSGGGGSGGGGSGGGGSDIQMTQSPSSLSASVGDRVTITCRASQGIRNDLGWYQQKPGKAPKRLIYAASSLQSGVPSRFSGSGSGTEFTLTISSLQPEDFATYYCLQHNSYPLTFGGGTKVEIKSGGGGSEVQLVESGGGLVQPGGSLKLSCAASGFTFNKYAMNWVRQAPGKGLEWVARIRSKYNNYATYYADSVKDRFTISRDDSKNTAYLQMNNLKTEDTAVYYCVRHGNFGNSYISYWAYWGQGTLVTVSSGGGGSGGGGSGGGGSQTVVTQEPSLTVSPGGTVTLTCGSSTGAVTSGNYPNWVQQKPGQAPRGLIGGTKFLAPGTPARFSGSLLGGKAALTLSGVQPEDEAEYYCVLWYSNRWVFGGGTKLTVL

SEQ ID NO: 451 - protein, 7 aa, Artificial Sequence
  Synthetic peptide
NARMGVS

SEQ ID NO: 452 - protein, 16 aa, Artificial Sequence
  Synthetic peptide
HIFSNDEKSYSTSLKS

SEQ ID NO: 453 - protein, 14 aa, Artificial Sequence
  Synthetic peptide
IVGYGTGWYGFFDY

SEQ ID NO: 454 - protein, 11 aa, Artificial Sequence
  Synthetic peptide
RTSQGIRNDLG

SEQ ID NO: 455 - protein, 7 aa, Artificial Sequence
  Synthetic peptide
AASSLQS

SEQ ID NO: 456 - protein, 9 aa, Artificial Sequence
  Synthetic peptide
LQHNSYPLT

SEQ ID NO: 457 - protein, 124 aa, Artificial Sequence
  Synthetic peptide
QVTLKESGPALVKPTQTLTLTCTFSGFSLSNARMGVSWIRQPPGKALEWLAHIFSNDEKSYSTSLKSRLTISKDTSKSQVVLTMTDMDPEDTATYYCARIVGYGTGWYGFFDYWGQGILVTVSS

SEQ ID NO: 458 - protein, 107 aa, Artificial Sequence
  Synthetic peptide
DIQMTQSPSSLSASVGDRVTITCRTSQGIRNDLGWYQQKPGKAPKRLIYAASSLQSGVPSRFSGSGSGTEFTLTISSLQPEDFATYYCLQHNSYPLTFGGGTKVEIK

SEQ ID NO: 459 - protein, 246 aa, Artificial Sequence
  Synthetic peptide
QVTLKESGPALVKPTQTLTLTCTFSGFSLSNARMGVSWIRQPPGKALEWLAHIFSNDEKSYSTSLKSRLTISKDTSKSQVVLTMTDMDPEDTATYYCARIVGYGTGWYGFFDYWGQGILVTVSSGGGGSGGGGSGGGGSDIQMTQSPSSLSASVGDRVTITCRTSQGIRNDLGWYQQKPGKAPKRLIYAASSLQSGVPSRFSGSGSGTEFTLTISSLQPEDFATYYCLQHNSYPLTFGGGTKVEIK

SEQ ID NO: 460 - protein, 501 aa, Artificial Sequence
  Synthetic peptide
QVTLKESGPALVKPTQTLTLTCTFSGFSLSNARMGVSWIRQPPGKALEWLAHIFSNDEKSYSTSLKSRLTISKDTSKSQVVLTMTDMDPEDTATYYCARIVGYGTGWYGFFDYWGQGILVTVSSGGGGSGGGGSGGGGSDIQMTQSPSSLSASVGDRVTITCRTSQGIRNDLGWYQQKPGKAPKRLIYAASSLQSGVPSRFSGSGSGTEFTLTISSLQPEDFATYYCLQHNSYPLTFGGGTKVEIKSGGGGSEVQLVESGGGLVQPGGSLKLSCAASGFTFNKYAMNWVRQAPGKGLEWVARIRSKYNNYATYYADSVKDRFTISRDDSKNTAYLQMNNLKTEDTAVYYCVRHGNFGNSYISYWAYWGQGTLVTVSSGGGGSGGGGSGGGGSQTVVTQEPSLTVSPGGTVTLTCGSSTGAVTSGNYPNWVQQKPGQAPRGLIGGTKFLAPGTPARFSGSLLGGKAALTLSGVQPEDEAEYYCVLWYSNRWVFGGGTKLTVL

SEQ ID NO: 461 - protein, 7 aa, Artificial Sequence
  Synthetic peptide
NARMGVS

SEQ ID NO: 462 - protein, 16 aa, Artificial Sequence
  Synthetic peptide
HIFSNDEKSYSTSLKS

SEQ ID NO: 463 - protein, 14 aa, Artificial Sequence
  Synthetic peptide
IVGYGSGWYGYFDY

SEQ ID NO: 464 - protein, 11 aa, Artificial Sequence
  Synthetic peptide
RASQGIRNDLV

SEQ ID NO: 465 - protein, 7 aa, Artificial Sequence
  Synthetic peptide
AASTLQS

SEQ ID NO: 466 - protein, 9 aa, Artificial Sequence
  Synthetic peptide
LQHYSYPLT

SEQ ID NO: 467 - protein, 124 aa, Artificial Sequence
  Synthetic peptide
QVTLKESGPTLVKPTETLTLTCTVSGFSFRNARMGVSWIRQPPGKALEWLAHIFSNDEKSYSTSLKSRLTISKDTSKGQVVLTMTNMDPVDTATYYCARIVGYGSGWYGYFDYWGQGTLVTVSS

SEQ ID NO: 468 - protein, 107 aa, Artificial Sequence
  Synthetic peptide
DIQMTQSPSSLSASVGDRVTITCRASQGIRNDLVWYQQKPGKAPKRLIYAASTLQSGVPSRFSGSGSGTEFILTISSLQPEDFATYFCLQHYSYPLTFGGGTKLEIK

SEQ ID NO: 469 - protein, 246 aa, Artificial Sequence
  Synthetic peptide
QVTLKESGPTLVKPTETLTLTCTVSGFSFRNARMGVSWIRQPPGKALEWLAHIFSNDEKSYSTSLKSRLTISKDTSKGQVVLTMTNMDPVDTATYYCARIVGYGSGWYGYFDYWGQGTLVTVSSGGGGSGGGGSGGGGSDIQMTQSPSSLSASVGDRVTITCRASQGIRNDLVWYQQKPGKAPKRLIYAASTLQSGVPSRFSGSGSGTEFILTISSLQPEDFATYFCLQHYSYPLTFGGGTKLEIK

SEQ ID NO: 470 - protein, 501 aa, Artificial Sequence
  Synthetic peptide
QVTLKESGPTLVKPTETLTLTCTVSGFSFRNARMGVSWIRQPPGKALEWLAHIFSNDEKSYSTSLKSRLTISKDTSKGQVVLTMTNMDPVDTATYYCARIVGYGSGWYGYFDYWGQGTLVTVSSGGGGSGGGGSGGGGSDIQMTQSPSSLSASVGDRVTITCRASQGIRNDLVWYQQKPGKAPKRLIYAASTLQSGVPSRFSGSGSGTEFILTISSLQPEDFATYFCLQHYSYPLTFGGGTKLEIKSGGGGSEVQLVESGGGLVQPGGSLKLSCAASGFTFNKYAMNWVRQAPGKGLEWVARIRSKYNNYATYYADSVKDRFTISRDDSKNTAYLQMNNLKTEDTAVYYCVRHGNFGNSYISYWAYWGQGTLVTVSSGGGGSGGGGSGGGGSQTVVTQEPSLTVSPGGTVTLTCGSSTGAVTSGNYPNWVQQKPGQAPRGLIGGTKFLAPGTPARFSGSLLGGKAALTLSGVQPEDEAEYYCVLWYSNRWVFGGGTKLTVL

SEQ ID NO: 471 - protein, 7 aa, Artificial Sequence
  Synthetic peptide
NARMGVS

SEQ ID NO: 472 - protein, 16 aa, Artificial Sequence
  Synthetic peptide
HIFSNDEKSYSTSLKS

SEQ ID NO: 473 - protein, 14 aa, Artificial Sequence
  Synthetic peptide
IVGYGSGWYGYFDY

SEQ ID NO: 474 - protein, 11 aa, Artificial Sequence
  Synthetic peptide
RASQGIGDDLG

SEQ ID NO: 475 - protein, 7 aa, Artificial Sequence
  Synthetic peptide
ATSVLQS

SEQ ID NO: 476 - protein, 9 aa, Artificial Sequence
  Synthetic peptide
LQHNSYPLT

SEQ ID NO: 477 - protein, 124 aa, Artificial Sequence
  Synthetic peptide
QVTLKESGPVLVKPTETLTLTCTVSGFSLRNARMGVSWIRQPPGKTLEWLAHIFSNDEKSYSTSLKSRLTISKDTSKGQVVLTMTNMDPVDTATYYCARIVGYGSGWYGYFDYWGQGTLVTVSS

SEQ ID NO: 478 - protein, 107 aa, Artificial Sequence
  Synthetic peptide
DIQMTQSPSSLSASVGDRVTITCRASQGIGDDLGWYQQIPGKAPKRLIYATSVLQSGVPSRFSGSGSGTEFTLTISSLQPEDFATYYCLQHNSYPLTFGGGTKLEIK

SEQ ID NO: 479 - protein, 246 aa, Artificial Sequence
  Synthetic peptide
QVTLKESGPVLVKPTETLTLTCTVSGFSLRNARMGVSWIRQPPGKTLEWLAHIFSNDEKSYSTSLKSRLTISKDTSKGQVVLTMTNMDPVDTATYYCARIVGYGSGWYGYFDYWGQGTLVTVSSGGGGSGGGGSGGGGSDIQMTQSPSSLSASVGDRVTITCRASQGIGDDLGWYQQIPGKAPKRLIYATSVLQSGVPSRFSGSGSGTEFTLTISSLQPEDFATYYCLQHNSYPLTFGGGTKLEIK

SEQ ID NO: 480 - protein, 501 aa, Artificial Sequence
  Synthetic peptide
QVTLKESGPVLVKPTETLTLTCTVSGFSLRNARMGVSWIRQPPGKTLEWLAHIFSNDEKSYSTSLKSRLTISKDTSKGQVVLTMTNMDPVDTATYYCARIVGYGSGWYGYFDYWGQGTLVTVSSGGGGSGGGGSGGGGSDIQMTQSPSSLSASVGDRVTITCRASQGIGDDLGWYQQIPGKAPKRLIYATSVLQSGVPSRFSGSGSGTEFTLTISSLQPEDFATYYCLQHNSYPLTFGGGTKLEIKSGGGGSEVQLVESGGGLVQPGGSLKLSCAASGFTFNKYAMNWVRQAPGKGLEWVARIRSKYNNYATYYADSVKDRFTISRDDSKNTAYLQMNNLKTEDTAVYYCVRHGNFGNSYISYWAYWGQGTLVTVSSGGGGSGGGGSGGGGSQTVVTQEPSLTVSPGGTVTLTCGSSTGAVTSGNYPNWVQQKPGQAPRGLIGGTKFLAPGTPARFSGSLLGGKAALTLSGVQPEDEAEYYCVLWYSNRWVFGGGTKLTVL

SEQ ID NO: 481 - protein, 7 aa, Artificial Sequence
  Synthetic peptide
NARMGVS

SEQ ID NO: 482 - protein, 16 aa, Artificial Sequence
  Synthetic peptide
HIFWNDEKSYSTSLKS

SEQ ID NO: 483 - protein, 15 aa, Artificial Sequence
  Synthetic peptide
IPYYGSGSYNYGMDV

SEQ ID NO: 484 - protein, 11 aa, Artificial Sequence
  Synthetic peptide
RASQGIRNDLG

SEQ ID NO: 485 - protein, 7 aa, Artificial Sequence
  Synthetic peptide
AASSLQS

SEQ ID NO: 486 - protein, 9 aa, Artificial Sequence
  Synthetic peptide
LQHNSYPLT

SEQ ID NO: 487 - protein, 125 aa, Artificial Sequence
  Synthetic peptide
QVTLKESGPALVKPTETLTLTCTFSGFSLRNARMGVSWIRQPPGKALEWLAHIFWNDEKSYSTSLKSRLTISKDTSKSQVVLTMTNMDPVDTATYYCARIPYYGSGSYNYGMDVWGQGTTVTVSS

SEQ ID NO: 488 - protein, 107 aa, Artificial Sequence
  Synthetic peptide
DIQMTQSPSSLSASVGDRVTITCRASQGIRNDLGWYQQKPGKAPKRLIYAASSLQSGVPSRFSGSGSGTEFTLTISSLQPEDFATYYCLQHNSYPLTFGGGTKLEIK

SEQ ID NO: 489 - protein, 247 aa, Artificial Sequence
  Synthetic peptide
QVTLKESGPALVKPTETLTLTCTFSGFSLRNARMGVSWIRQPPGKALEWLAHIFWNDEKSYSTSLKSRLTISKDTSKSQVVLTMTNMDPVDTATYYCARIPYYGSGSYNYGMDVWGQGTTVTVSSGGGGSGGGGSGGGGSDIQMTQSPSSLSASVGDRVTITCRASQGIRNDLGWYQQKPGKAPKRLIYAASSLQSGVPSRFSGSGSGTEFTLTISSLQPEDFATYYCLQHNSYPLTFGGGTKLEIK

SEQ ID NO: 490 - protein, 502 aa, Artificial Sequence
  Synthetic peptide
QVTLKESGPALVKPTETLTLTCTFSGFSLRNARMGVSWIRQPPGKALEWLAHIFWNDEKSYSTSLKSRLTISKDTSKSQVVLTMTNMDPVDTATYYCARIPYYGSGSYNYGMDVWGQGTTVTVSSGGGGSGGGGSGGGGSDIQMTQSPSSLSASVGDRVTITCRASQGIRNDLGWYQQKPGKAPKRLIYAASSLQSGVPSRFSGSGSGTEFTLTISSLQPEDFATYYCLQHNSYPLTFGGGTKLEIKSGGGGSEVQLVESGGGLVQPGGSLKLSCAASGFTFNKYAMNWVRQAPGKGLEWVARIRSKYNNYATYYADSVKDRFTISRDDSKNTAYLQMNNLKTEDTAVYYCVRHGNFGNSYISYWAYWGQGTLVTVSSGGGGSGGGGSGGGGSQTVVTQEPSLTVSPGGTVTLTCGSSTGAVTSGNYPNWVQQKPGQAPRGLIGGTKFLAPGTPARFSGSLLGGKAALTLSGVQPEDEAEYYCVLWYSNRWVFGGGTKLTVL

SEQ ID NO: 491 - protein, 7 aa, Artificial Sequence
  Synthetic peptide
NARMGVS

SEQ ID NO: 492 - protein, 16 aa, Artificial Sequence
  Synthetic peptide
HIFSNDEKSYSTSLKN

SEQ ID NO: 493 - protein, 14 aa, Artificial Sequence
  Synthetic peptide
IVGYGTGWYGFFDY

SEQ ID NO: 494 - protein, 11 aa, Artificial Sequence
  Synthetic peptide
RASQDIRDDLV

SEQ ID NO: 495 - protein, 7 aa, Artificial Sequence
  Synthetic peptide
GTSTLQS

SEQ ID NO: 496 - protein, 9 aa, Artificial Sequence
  Synthetic peptide
LQHHSYPLT

SEQ ID NO: 497 - protein, 124 aa, Artificial Sequence
  Synthetic peptide
QVTLKESGPALVKPTETLTLTCTVSGFSLNNARMGVSWIRQPPGKALEWLAHIFSNDEKSYSTSLKNRLTISKDSSKTQVVLTMTNVDPVDTATYYCARIVGYGTGWYGFFDYWGQGTQVTVSS

SEQ ID NO: 498 - protein, 107 aa, Artificial Sequence
  Synthetic peptide
DIQMTQSPSSLSASVGDRVTITCRASQDIRDDLVWYQQKPGKAPKRLIYGTSTLQSGVPSRFSGSGSGTEFTLTISSLQPEDFATYYCLQHHSYPLTFGGGTKLEIK

SEQ ID NO: 499 - protein, 246 aa, Artificial Sequence
  Synthetic peptide
QVTLKESGPALVKPTETLTLTCTVSGFSLNNARMGVSWIRQPPGKALEWLAHIFSNDEKSYSTSLKNRLTISKDSSKTQVVLTMTNVDPVDTATYYCARIVGYGTGWYGFFDYWGQGTQVTVSSGGGGSGGGGSGGGGSDIQMTQSPSSLSASVGDRVTITCRASQDIRDDLVWYQQKPGKAPKRLIYGTSTLQSGVPSRFSGSGSGTEFTLTISSLQPEDFATYYCLQHHSYPLTFGGGTKLEIK

SEQ ID NO: 500 - protein, 501 aa, Artificial Sequence
  Synthetic peptide
QVTLKESGPALVKPTETLTLTCTVSGFSLNNARMGVSWIRQPPGKALEWLAHIFSNDEKSYSTSLKNRLTISKDSSKTQVVLTMTNVDPVDTATYYCARIVGYGTGWYGFFDYWGQGTQVTVSSGGGGSGGGGSGGGGSDIQMTQSPSSLSASVGDRVTITCRASQDIRDDLVWYQQKPGKAPKRLIYGTSTLQSGVPSRFSGSGSGTEFTLTISSLQPEDFATYYCLQHHSYPLTFGGGTKLEIKSGGGGSEVQLVESGGGLVQPGGSLKLSCAASGFTFNKYAMNWVRQAPGKGLEWVARIRSKYNNYATYYADSVKDRFTISRDDSKNTAYLQMNNLKTEDTAVYYCVRHGNFGNSYISYWAYWGQGTLVTVSSGGGGSGGGGSGGGGSQTVVTQEPSLTVSPGGTVTLTCGSSTGAVTSGNYPNWVQQKPGQAPRGLIGGTKFLAPGTPARFSGSLLGGKAALTLSGVQPEDEAEYYCVLWYSNRWVFGGGTKLTVL

SEQ ID NO: 501 - protein, 7 aa, Artificial Sequence
  Synthetic peptide
YARMGVS

SEQ ID NO: 502 - protein, 16 aa, Artificial Sequence
  Synthetic peptide
HIFSNDEKSYSTSLKS

SEQ ID NO: 503 - protein, 14 aa, Artificial Sequence
  Synthetic peptide
MPEYSSGWSGAFDI

SEQ ID NO: 504 - protein, 11 aa, Artificial Sequence
  Synthetic peptide
RASQDIRNDLA

SEQ ID NO: 505 - protein, 7 aa, Artificial Sequence
  Synthetic peptide
AASSLQS

SEQ ID NO: 506 - protein, 9 aa, Artificial Sequence
  Synthetic peptide
LQHNSYPLT

SEQ ID NO: 507 - protein, 124 aa, Artificial Sequence
  Synthetic peptide
QVTLKESGPTLVKPTETLTLTCTFSGFSLRYARMGVSWIRQPPGKALEWLAHIFSNDEKSYSTSLKSRLTISKDTSKSQVVLTLTNMDPVDTATYFCARMPEYSSGWSGAFDIWGQGTMVTVSS

SEQ ID NO: 508 - protein, 107 aa, Artificial Sequence
  Synthetic peptide
DIQMTQSPSSLSASVGDRVTITCRASQDIRNDLAWYQQKPGKAPKRLIYAASSLQSGVPSRFSGSGSGTEFTLTISSLQPEDFATYYCLQHNSYPLTFGGGTKLEIK

SEQ ID NO: 509 - protein, 246 aa, Artificial Sequence
  Synthetic peptide
QVTLKESGPTLVKPTETLTLTCTFSGFSLRYARMGVSWIRQPPGKALEWLAHIFSNDEKSYSTSLKSRLTISKDTSKSQVVLTLTNMDPVDTATYFCARMPEYSSGWSGAFDIWGQGTMVTVSSGGGGSGGGGSGGGGSDIQMTQSPSSLSASVGDRVTITCRASQDIRNDLAWYQQKPGKAPKRLIYAASSLQSGVPSRFSGSGSGTEFTLTISSLQPEDFATYYCLQHNSYPLTFGGGTKLEIK

SEQ ID NO: 510 - protein, 501 aa, Artificial Sequence
  Synthetic peptide
QVTLKESGPTLVKPTETLTLTCTFSGFSLRYARMGVSWIRQPPGKALEWLAHIFSNDEKSYSTSLKSRLTISKDTSKSQVVLTLTNMDPVDTATYFCARMPEYSSGWSGAFDIWGQGTMVTVSSGGGGSGGGGSGGGGSDIQMTQSPSSLSASVGDRVTITCRASQDIRNDLAWYQQKPGKAPKRLIYAASSLQSGVPSRFSGSGSGTEFTLTISSLQPEDFATYYCLQHNSYPLTFGGGTKLEIKSGGGGSEVQLVESGGGLVQPGGSLKLSCAASGFTFNKYAMNWVRQAPGKGLEWVARIRSKYNNYATYYADSVKDRFTISRDDSKNTAYLQMNNLKTEDTAVYYCVRHGNFGNSYISYWAYWGQGTLVTVSSGGGGSGGGGSGGGGSQTVVTQEPSLTVSPGGTVTLTCGSSTGAVTSGNYPNWVQQKPGQAPRGLIGGTKFLAPGTPARFSGSLLGGKAALTLSGVQPEDEAEYYCVLWYSNRWVFGGGTKLTVL

SEQ ID NO: 511 - protein, 7 aa, Artificial Sequence
  Synthetic peptide
NIKMGVS

SEQ ID NO: 512 - protein, 16 aa, Artificial Sequence
  Synthetic peptide
HIFSNDEKSYSTSLKS

SEQ ID NO: 513 - protein, 14 aa, Artificial Sequence
  Synthetic peptide
MPEYSSGWSGAFDI

SEQ ID NO: 514 - protein, 11 aa, Artificial Sequence
  Synthetic peptide
RASQDISNYLA

SEQ ID NO: 515 - protein, 7 aa, Artificial Sequence
  Synthetic peptide
AASSLQS

SEQ ID NO: 516 - protein, 9 aa, Artificial Sequence
  Synthetic peptide
LQHNSFPLT

SEQ ID NO: 517 - protein, 124 aa, Artificial Sequence
  Synthetic peptide
QVTLKESGPVLVKPTETLTLTCTVSGFSLRNIKMGVSWIRQPPGKALEWLAHIFSNDEKSYSTSLKSRLTISKDTSKSQVVLTLTNMDPVDTATYFCARMPEYSSGWSGAFDIWGQGTMVTVSS

SEQ ID NO: 518 - protein, 107 aa, Artificial Sequence
  Synthetic peptide
DIQMTQSPSSLSASVGDRVTITCRASQDISNYLAWYQQKPGKAPKRLIYAASSLQSGVPSRFSGSGSGTEFTLTISSLQPEDFATYYCLQHNSFPLTFGGGTKLEIK

SEQ ID NO: 519 - protein, 246 aa, Artificial Sequence
  Synthetic peptide
QVTLKESGPVLVKPTETLTLTCTVSGFSLRNIKMGVSWIRQPPGKALEWLAHIFSNDEKSYSTSLKSRLTISKDTSKSQVVLTLTNMDPVDTATYFCARMPEYSSGWSGAFDIWGQGTMVTVSSGGGGSGGGGSGGGGSDIQMTQSPSSLSASVGDRVTITCRASQDISNYLAWYQQKPGKAPKRLIYAASSLQSGVPSRFSGSGSGTEFTLTISSLQPEDFATYYCLQHNSFPLTFGGGTKLEIK

SEQ ID NO: 520 - protein, 501 aa, Artificial Sequence
  Synthetic peptide
QVTLKESGPVLVKPTETLTLTCTVSGFSLRNIKMGVSWIRQPPGKALEWLAHIFSNDEKSYSTSLKSRLTISKDTSKSQVVLTLTNMDPVDTATYFCARMPEYSSGWSGAFDIWGQGTMVTVSSGGGGSGGGGSGGGGSDIQMTQSPSSLSASVGDRVTITCRASQDISNYLAWYQQKPGKAPKRLIYAASSLQSGVPSRFSGSGSGTEFTLTISSLQPEDFATYYCLQHNSFPLTFGGGTKLEIKSGGGGSEVQLVESGGGLVQPGGSLKLSCAASGFTFNKYAMNWVRQAPGKGLEWVARIRSKYNNYATYYADSVKDRFTISRDDSKNTAYLQMNNLKTEDTAVYYCVRHGNFGNSYISYWAYWGQGTLVTVSSGGGGSGGGGSGGGGSQTVVTQEPSLTVSPGGTVTLTCGSSTGAVTSGNYPNWVQQKPGQAPRGLIGGTKFLAPGTPARFSGSLLGGKAALTLSGVQPEDEAEYYCVLWYSNRWVFGGGTKLTVL

SEQ ID NO: 521 - protein, 7 aa, Artificial Sequence
  Synthetic peptide
NARMGVS

SEQ ID NO: 522 - protein, 16 aa, Artificial Sequence
  Synthetic peptide
HIFSNDEKSYSTSLKS

SEQ ID NO: 523 - protein, 14 aa, Artificial Sequence
  Synthetic peptide
MPEYSSGWSGAFDI

SEQ ID NO: 524 - protein, 11 aa, Artificial Sequence
  Synthetic peptide
RASQGIRNDLG

SEQ ID NO: 525 - protein, 7 aa, Artificial Sequence
  Synthetic peptide
AASSLQS

SEQ ID NO: 526 - protein, 9 aa, Artificial Sequence
  Synthetic peptide
LQHNSYPLT

SEQ ID NO: 527 - protein, 124 aa, Artificial Sequence
  Synthetic peptide
QVTLKESGPVLVKPTETLTLTCTVSGFSFRNARMGVSWIRQPPGKALEWLAHIFSNDEKSYSTSLKSRLTISKDTSKSQVVLTLTNMDPVDTATYFCARMPEYSSGWSGAFDIWGQGTLVTVSS

SEQ ID NO: 528 - protein, 107 aa, Artificial Sequence; identical to SEQ ID NO: 488
  Synthetic peptide

SEQ ID NO: 529 - protein, 246 aa, Artificial Sequence
  Synthetic peptide
QVTLKESGPVLVKPTETLTLTCTVSGFSFRNARMGVSWIRQPPGKALEWLAHIFSNDEKSYSTSLKSRLTISKDTSKSQVVLTLTNMDPVDTATYFCARMPEYSSGWSGAFDIWGQGTLVTVSSGGGGSGGGGSGGGGSDIQMTQSPSSLSASVGDRVTITCRASQGIRNDLGWYQQKPGKAPKRLIYAASSLQSGVPSRFSGSGSGTEFTLTISSLQPEDFATYYCLQHNSYPLTFGGGTKLEIK

SEQ ID NO: 530 - protein, 501 aa, Artificial Sequence
  Synthetic peptide
QVTLKESGPVLVKPTETLTLTCTVSGFSFRNARMGVSWIRQPPGKALEWLAHIFSNDEKSYSTSLKSRLTISKDTSKSQVVLTLTNMDPVDTATYFCARMPEYSSGWSGAFDIWGQGTLVTVSSGGGGSGGGGSGGGGSDIQMTQSPSSLSASVGDRVTITCRASQGIRNDLGWYQQKPGKAPKRLIYAASSLQSGVPSRFSGSGSGTEFTLTISSLQPEDFATYYCLQHNSYPLTFGGGTKLEIKSGGGGSEVQLVESGGGLVQPGGSLKLSCAASGFTFNKYAMNWVRQAPGKGLEWVARIRSKYNNYATYYADSVKDRFTISRDDSKNTAYLQMNNLKTEDTAVYYCVRHGNFGNSYISYWAYWGQGTLVTVSSGGGGSGGGGSGGGGSQTVVTQEPSLTVSPGGTVTLTCGSSTGAVTSGNYPNWVQQKPGQAPRGLIGGTKFLAPGTPARFSGSLLGGKAALTLSGVQPEDEAEYYCVLWYSNRWVFGGGTKLTVL

SEQ ID NO: 531 - protein, 7 aa, Artificial Sequence
  Synthetic peptide
NARMGVS

SEQ ID NO: 532 - protein, 16 aa, Artificial Sequence
  Synthetic peptide
HIFSNDEKSYSTSLKN

SEQ ID NO: 533 - protein, 14 aa, Artificial Sequence
  Synthetic peptide
IVGYGSGWYGFFDY

SEQ ID NO: 534 - protein, 11 aa, Artificial Sequence
  Synthetic peptide
RASQGIRNDLG

SEQ ID NO: 535 - protein, 7 aa, Artificial Sequence
  Synthetic peptide
AASTLQS

SEQ ID NO: 536 - protein, 9 aa, Artificial Sequence
  Synthetic peptide
LQHNSYPLT

SEQ ID NO: 537 - protein, 124 aa, Artificial Sequence
  Synthetic peptide
QVTLKESGPTLVKPTETLTLTCTLSGFSLNNARMGVSWIRQPPGKCLEWLAHIFSNDEKSYSTSLKNRLTISKDSSKTQVVLTMTNVDPVDTATYYCARIVGYGSGWYGFFDYWGQGTLVTVSS

SEQ ID NO: 538 - protein, 107 aa, Artificial Sequence
  Synthetic peptide
DIQMTQSPSSLSASVGDRVTITCRASQGIRNDLGWYQQKPGKAPKRLIYAASTLQSGVPSRFSGSGSGTEFTLTISSLQPEDFATYYCLQHNSYPLTFGCGTKVEIK

SEQ ID NO: 539 - protein, 246 aa, Artificial Sequence
  Synthetic peptide
QVTLKESGPTLVKPTETLTLTCTLSGFSLNNARMGVSWIRQPPGKCLEWLAHIFSNDEKSYSTSLKNRLTISKDSSKTQVVLTMTNVDPVDTATYYCARIVGYGSGWYGFFDYWGQGTLVTVSSGGGGSGGGGSGGGGSDIQMTQSPSSLSASVGDRVTITCRASQGIRNDLGWYQQKPGKAPKRLIYAASTLQSGVPSRFSGSGSGTEFTLTISSLQPEDFATYYCLQHNSYPLTFGCGTKVEIK

SEQ ID NO: 540 - protein, 501 aa, Artificial Sequence
  Synthetic peptide
QVTLKESGPTLVKPTETLTLTCTLSGFSLNNARMGVSWIRQPPGKCLEWLAHIFSNDEKSYSTSLKNRLTISKDSSKTQVVLTMTNVDPVDTATYYCARIVGYGSGWYGFFDYWGQGTLVTVSSGGGGSGGGGSGGGGSDIQMTQSPSSLSASVGDRVTITCRASQGIRNDLGWYQQKPGKAPKRLIYAASTLQSGVPSRFSGSGSGTEFTLTISSLQPEDFATYYCLQHNSYPLTFGCGTKVEIKSGGGGSEVQLVESGGGLVQPGGSLKLSCAASGFTFNKYAMNWVRQAPGKGLEWVARIRSKYNNYATYYADSVKDRFTISRDDSKNTAYLQMNNLKTEDTAVYYCVRHGNFGNSYISYWAYWGQGTLVTVSSGGGGSGGGGSGGGGSQTVVTQEPSLTVSPGGTVTLTCGSSTGAVTSGNYPNWVQQKPGQAPRGLIGGTKFLAPGTPARFSGSLLGGKAALTLSGVQPEDEAEYYCVLWYSNRWVFGGGTKLTVL

SEQ ID NO: 541 - protein, 7 aa, Artificial Sequence
  Synthetic peptide
NARMGVS

SEQ ID NO: 542 - protein, 16 aa, Artificial Sequence
  Synthetic peptide
NIFSNDEKSYSTSLKS

SEQ ID NO: 543 - protein, 14 aa, Artificial Sequence
  Synthetic peptide
IVGYGSGWYGYFDY

SEQ ID NO: 544 - protein, 11 aa, Artificial Sequence
  Synthetic peptide
RASQDIRNDLG

SEQ ID NO: 545 - protein, 7 aa, Artificial Sequence
  Synthetic peptide
ATSIRQS

SEQ ID NO: 546 - protein, 9 aa, Artificial Sequence
  Synthetic peptide
LQHNSFPLT

SEQ ID NO: 547 - protein, 124 aa, Artificial Sequence
  Synthetic peptide
QVTLKESGPTLVKPTETLTLTCTVSGFSLSNARMGVSWIRQPPGKCLEWLANIFSNDEKSYSTSLKSRLTISKGTSKSQVVLTMTNVNPVDTGTYYCARIVGYGSGWYGYFDYWGQGTLVTVSS

SEQ ID NO: 548 - protein, 107 aa, Artificial Sequence
  Synthetic peptide
DIQMTQSPSSLSASVGDRVTITCRASQDIRNDLGWYQQKPGKAPKRLIYATSIRQSGVPSRFTGSGSGTEFTLTISGLQPEDFATYFCLQHNSFPLTFGCGTKVEIK

SEQ ID NO: 549 - protein, 246 aa, Artificial Sequence
  Synthetic peptide
QVTLKESGPTLVKPTETLTLTCTVSGFSLSNARMGVSWIRQPPGKCLEWLANIFSNDEKSYSTSLKSRLTISKGTSKSQVVLTMTNVNPVDTGTYYCARIVGYGSGWYGYFDYWGQGTLVTVSSGGGGSGGGGSGGGGSDIQMTQSPSSLSASVGDRVTITCRASQDIRNDLGWYQQKPGKAPKRLIYATSIRQSGVPSRFTGSGSGTEFTLTISGLQPEDFATYFCLQHNSFPLTFGCGTKVEIK

SEQ ID NO: 550 - protein, 501 aa, Artificial Sequence
  Synthetic peptide
QVTLKESGPTLVKPTETLTLTCTVSGFSLSNARMGVSWIRQPPGKCLEWLANIFSNDEKSYSTSLKSRLTISKGTSKSQVVLTMTNVNPVDTGTYYCARIVGYGSGWYGYFDYWGQGTLVTVSSGGGGSGGGGSGGGGSDIQMTQSPSSLSASVGDRVTITCRASQDIRNDLGWYQQKPGKAPKRLIYATSIRQSGVPSRFTGSGSGTEFTLTISGLQPEDFATYFCLQHNSFPLTFGCGTKVEIKSGGGGSEVQLVESGGGLVQPGGSLKLSCAASGFTFNKYAMNWVRQAPGKGLEWVARIRSKYNNYATYYADSVKDRFTISRDDSKNTAYLQMNNLKTEDTAVYYCVRHGNFGNSYISYWAYWGQGTLVTVSSGGGGSGGGGSGGGGSQTVVTQEPSLTVSPGGTVTLTCGSSTGAVTSGNYPNWVQQKPGQAPRGLIGGTKFLAPGTPARFSGSLLGGKAALTLSGVQPEDEAEYYCVLWYSNRWVFGGGTKLTVL

SEQ ID NO: 551 - protein, 7 aa, Artificial Sequence
  Synthetic peptide
NARMGVS

SEQ ID NO: 552 - protein, 16 aa, Artificial Sequence
  Synthetic peptide
HIFSNDEKSFSTSLKN

SEQ ID NO: 553 - protein, 14 aa, Artificial Sequence
  Synthetic peptide
MVGYGSGWYAYFDY

SEQ ID NO: 554 - protein, 11 aa, Artificial Sequence
  Synthetic peptide
RASQSISSYLN

SEQ ID NO: 555 - protein, 7 aa, Artificial Sequence
  Synthetic peptide
AASSLQS

SEQ ID NO: 556 - protein, 9 aa, Artificial Sequence
  Synthetic peptide
LQHNSYPLT

SEQ ID NO: 557 - protein, 124 aa, Artificial Sequence
  Synthetic peptide
QVTLKESGPVLVKPTQTLTLTCTFSGFSLSNARMGVSWIRQPPGKCLEWLAHIFSNDEKSFSTSLKNRLTISKDTSKSQVVLTMTNMDPVDTATYYCARMVGYGSGWYAYFDYWGQGTQVTVSS

SEQ ID NO: 558 - protein, 107 aa, Artificial Sequence
  Synthetic peptide
DIQMTQSPSSLSASVGDRVTITCRASQSISSYLNWYQQKPGKAPKLLIYAASSLQSGVPSRFSGSGSGTDFTLTISSLQPEDFATYYCLQHNSYPLTFGCGTKVEIK

SEQ ID NO: 559 - protein, 246 aa, Artificial Sequence
  Synthetic peptide
QVTLKESGPVLVKPTQTLTLTCTFSGFSLSNARMGVSWIRQPPGKCLEWLAHIFSNDEKSFSTSLKNRLTISKDTSKSQVVLTMTNMDPVDTATYYCARMVGYGSGWYAYFDYWGQGTQVTVSSGGGGSGGGGSGGGGSDIQMTQSPSSLSASVGDRVTITCRASQSISSYLNWYQQKPGKAPKLLIYAASSLQSGVPSRFSGSGSGTDFTLTISSLQPEDFATYYCLQHNSYPLTFGCGTKVEIK

SEQ ID NO: 560 - protein, 501 aa, Artificial Sequence
  Synthetic peptide
QVTLKESGPVLVKPTQTLTLTCTFSGFSLSNARMGVSWIRQPPGKCLEWLAHIFSNDEKSFSTSLKNRLTISKDTSKSQVVLTMTNMDPVDTATYYCARMVGYGSGWYAYFDYWGQGTQVTVSSGGGGSGGGGSGGGGSDIQMTQSPSSLSASVGDRVTITCRASQSISSYLNWYQQKPGKAPKLLIYAASSLQSGVPSRFSGSGSGTDFTLTISSLQPEDFATYYCLQHNSYPLTFGCGTKVEIKSGGGGSEVQLVESGGGLVQPGGSLKLSCAASGFTFNKYAMNWVRQAPGKGLEWVARIRSKYNNYATYYADSVKDRFTISRDDSKNTAYLQMNNLKTEDTAVYYCVRHGNFGNSYISYWAYWGQGTLVTVSSGGGGSGGGGSGGGGSQTVVTQEPSLTVSPGGTVTLTCGSSTGAVTSGNYPNWVQQKPGQAPRGLIGGTKFLAPGTPARFSGSLLGGKAALTLSGVQPEDEAEYYCVLWYSNRWVFGGGTKLTVL

SEQ ID NO: 561 - protein, 7 aa, Artificial Sequence
  Synthetic peptide
NARMAVS

SEQ ID NO: 562 - protein, 16 aa, Artificial Sequence
  Synthetic peptide
HIFSNDEKSYSTSLKS

SEQ ID NO: 563 - protein, 14 aa, Artificial Sequence
  Synthetic peptide
IVGYGTGWYGFFDY

SEQ ID NO: 564 - protein, 11 aa, Artificial Sequence
  Synthetic peptide
RASQGIRNDLA

SEQ ID NO: 565 - protein, 7 aa, Artificial Sequence
  Synthetic peptide
AASSLQS

SEQ ID NO: 566 - protein, 9 aa, Artificial Sequence
  Synthetic peptide
LQHNSYPLT

SEQ ID NO: 567 - protein, 124 aa, Artificial Sequence
  Synthetic peptide
QVTLKESGPALVKPTETLTLTCTLSGFSLNNARMAVSWIRQPPGKCLEWLAHIFSNDEKSYSTSLKSRLTISKDTSKSQVVLTMTNMDPEDTATYYCARIVGYGTGWYGFFDYWGQGILVTVSS

SEQ ID NO: 568 - protein, 107 aa, Artificial Sequence
  Synthetic peptide
DIQMTQSPSSLSASVGDRVTITCRASQGIRNDLAWYQQKPGKAPKRLIYAASSLQSGVPSRFSGSGSGTEFTLTISSLQPEDFATYYCLQHNSYPLTFGCGTKVEIK

SEQ ID NO: 569 - protein, 246 aa, Artificial Sequence
  Synthetic peptide
QVTLKESGPALVKPTETLTLTCTLSGFSLNNARMAVSWIRQPPGKCLEWLAHIFSNDEKSYSTSLKSRLTISKDTSKSQVVLTMTNMDPEDTATYYCARIVGYGTGWYGFFDYWGQGILVTVSSGGGGSGGGGSGGGGSDIQMTQSPSSLSASVGDRVTITCRASQGIRNDLAWYQQKPGKAPKRLIYAASSLQSGVPSRFSGSGSGTEFTLTISSLQPEDFATYYCLQHNSYPLTFGCGTKVEIK

SEQ ID NO: 570 - protein, 501 aa, Artificial Sequence
  Synthetic peptide
QVTLKESGPALVKPTETLTLTCTLSGFSLNNARMAVSWIRQPPGKCLEWLAHIFSNDEKSYSTSLKSRLTISKDTSKSQVVLTMTNMDPEDTATYYCARIVGYGTGWYGFFDYWGQGILVTVSSGGGGSGGGGSGGGGSDIQMTQSPSSLSASVGDRVTITCRASQGIRNDLAWYQQKPGKAPKRLIYAASSLQSGVPSRFSGSGSGTEFTLTISSLQPEDFATYYCLQHNSYPLTFGCGTKVEIKSGGGGSEVQLVESGGGLVQPGGSLKLSCAASGFTFNKYAMNWVRQAPGKGLEWVARIRSKYNNYATYYADSVKDRFTISRDDSKNTAYLQMNNLKTEDTAVYYCVRHGNFGNSYISYWAYWGQGTLVTVSSGGGGSGGGGSGGGGSQTVVTQEPSLTVSPGGTVTLTCGSSTGAVTSGNYPNWVQQKPGQAPRGLIGGTKFLAPGTPARFSGSLLGGKAALTLSGVQPEDEAEYYCVLWYSNRWVFGGGTKLTVL

SEQ ID NO: 571 - protein, 7 aa, Artificial Sequence
  Synthetic peptide
NARMGVS

SEQ ID NO: 572 - protein, 16 aa, Artificial Sequence
  Synthetic peptide
HIFSNDEKSYSTSLKS

SEQ ID NO: 573 - protein, 14 aa, Artificial Sequence
  Synthetic peptide
MPEYSSGWSGAFDI

SEQ ID NO: 574 - protein, 11 aa, Artificial Sequence
  Synthetic peptide
RASQGIRNDLV

SEQ ID NO: 575 - protein, 7 aa, Artificial Sequence
  Synthetic peptide
GTSTLQS

SEQ ID NO: 576 - protein, 9 aa, Artificial Sequence
  Synthetic peptide
LQHNSYPLT

SEQ ID NO: 577 - protein, 124 aa, Artificial Sequence
  Synthetic peptide
QVTLKESGPVLVKPTETLTLTCTVSGFSFRNARMGVSWIRQPPGKCLEWLAHIFSNDEKSYSTSLKSRLTISKDTSKSQVVLTLTNMDPVDTATYFCARMPEYSSGWSGAFDIWGQGTMVTVSS

SEQ ID NO: 578 - protein, 107 aa, Artificial Sequence
  Synthetic peptide
DIQMTQSPSSLSASVGDRVTITCRASQGIRNDLVWYQQKPGKAPKRLIYGTSTLQSGVPSRFSGSGSGTEFTLTISSLQPEDFATYYCLQHNSYPLTFGCGTKVEIK

SEQ ID NO: 579 - protein, 246 aa, Artificial Sequence
  Synthetic peptide
QVTLKESGPVLVKPTETLTLTCTVSGFSFRNARMGVSWIRQPPGKCLEWLAHIFSNDEKSYSTSLKSRLTISKDTSKSQVVLTLTNMDPVDTATYFCARMPEYSSGWSGAFDIWGQGTMVTVSSGGGGSGGGGSGGGGSDIQMTQSPSSLSASVGDRVTITCRASQGIRNDLVWYQQKPGKAPKRLIYGTSTLQSGVPSRFSGSGSGTEFTLTISSLQPEDFATYYCLQHNSYPLTFGCGTKVEIK

SEQ ID NO: 580 - protein, 501 aa, Artificial Sequence
  Synthetic peptide
QVTLKESGPVLVKPTETLTLTCTVSGFSFRNARMGVSWIRQPPGKCLEWLAHIFSNDEKSYSTSLKSRLTISKDTSKSQVVLTLTNMDPVDTATYFCARMPEYSSGWSGAFDIWGQGTMVTVSSGGGGSGGGGSGGGGSDIQMTQSPSSLSASVGDRVTITCRASQGIRNDLVWYQQKPGKAPKRLIYGTSTLQSGVPSRFSGSGSGTEFTLTISSLQPEDFATYYCLQHNSYPLTFGCGTKVEIKSGGGGSEVQLVESGGGLVQPGGSLKLSCAASGFTFNKYAMNWVRQAPGKGLEWVARIRSKYNNYATYYADSVKDRFTISRDDSKNTAYLQMNNLKTEDTAVYYCVRHGNFGNSYISYWAYWGQGTLVTVSSGGGGSGGGGSGGGGSQTVVTQEPSLTVSPGGTVTLTCGSSTGAVTSGNYPNWVQQKPGQAPRGLIGGTKFLAPGTPARFSGSLLGGKAALTLSGVQPEDEAEYYCVLWYSNRWVFGGGTKLTVL

SEQ ID NO: 581 - protein, 7 aa, Artificial Sequence
  Synthetic peptide
NARMGVS

SEQ ID NO: 582 - protein, 16 aa, Artificial Sequence
  Synthetic peptide
HIFSNDEKSYSTSLKS

SEQ ID NO: 583 - protein, 14 aa, Artificial Sequence
  Synthetic peptide
MPEYSSGWSGAFDI

SEQ ID NO: 584 - protein, 11 aa, Artificial Sequence
  Synthetic peptide
RTSQGIRNDLV

SEQ ID NO: 585 - protein, 7 aa, Artificial Sequence
  Synthetic peptide
AASTLQS

SEQ ID NO: 586 - protein, 9 aa, Artificial Sequence
  Synthetic peptide
LQHYSYPLT

SEQ ID NO: 587 - protein, 124 aa, Artificial Sequence; identical to SEQ ID NO: 577
  Synthetic peptide

SEQ ID NO: 588 - protein, 107 aa, Artificial Sequence
  Synthetic peptide
DIQMTQSPSSLSASVGDRVTITCRTSQGIRNDLVWYQQKPGKAPKRLIYAASTLQSGVPSRFSGSGSGTEFTLTISSLQPEDFATYFCLQHYSYPLTFGCGTKVEIK

SEQ ID NO: 589 - protein, 246 aa, Artificial Sequence
  Synthetic peptide
QVTLKESGPVLVKPTETLTLTCTVSGFSFRNARMGVSWIRQPPGKCLEWLAHIFSNDEKSYSTSLKSRLTISKDTSKSQVVLTLTNMDPVDTATYFCARMPEYSSGWSGAFDIWGQGTMVTVSSGGGGSGGGGSGGGGSDIQMTQSPSSLSASVGDRVTITCRTSQGIRNDLVWYQQKPGKAPKRLIYAASTLQSGVPSRFSGSGSGTEFTLTISSLQPEDFATYFCLQHYSYPLTFGCGTKVEIK

SEQ ID NO: 590 - protein, 501 aa, Artificial Sequence
  Synthetic peptide
QVTLKESGPVLVKPTETLTLTCTVSGFSFRNARMGVSWIRQPPGKCLEWLAHIFSNDEKSYSTSLKSRLTISKDTSKSQVVLTLTNMDPVDTATYFCARMPEYSSGWSGAFDIWGQGTMVTVSSGGGGSGGGGSGGGGSDIQMTQSPSSLSASVGDRVTITCRTSQGIRNDLVWYQQKPGKAPKRLIYAASTLQSGVPSRFSGSGSGTEFTLTISSLQPEDFATYFCLQHYSYPLTFGCGTKVEIKSGGGGSEVQLVESGGGLVQPGGSLKLSCAASGFTFNKYAMNWVRQAPGKGLEWVARIRSKYNNYATYYADSVKDRFTISRDDSKNTAYLQMNNLKTEDTAVYYCVRHGNFGNSYISYWAYWGQGTLVTVSSGGGGSGGGGSGGGGSQTVVTQEPSLTVSPGGTVTLTCGSSTGAVTSGNYPNWVQQKPGQAPRGLIGGTKFLAPGTPARFSGSLLGGKAALTLSGVQPEDEAEYYCVLWYSNRWVFGGGTKLTVL

SEQ ID NO: 591 - protein, 7 aa, Artificial Sequence
  Synthetic peptide
NARMGVS

SEQ ID NO: 592 - protein, 16 aa, Artificial Sequence
  Synthetic peptide
HIFSNDEKSYRTSLKS

SEQ ID NO: 593 - protein, 14 aa, Artificial Sequence
  Synthetic peptide
IVGYGSGWYAYFDY

SEQ ID NO: 594 - protein, 11 aa, Artificial Sequence
  Synthetic peptide
RASQGIRNDLG

SEQ ID NO: 595 - protein, 7 aa, Artificial Sequence
  Synthetic peptide
AASSLQS

SEQ ID NO: 596 - protein, 9 aa, Artificial Sequence
  Synthetic peptide
LQHNSYPLT

SEQ ID NO: 597 - protein, 124 aa, Artificial Sequence
  Synthetic peptide
QVTLKESGPALVKPTQTLTLTCTFSGFSLSNARMGVSWIRQPPGKCLEWLAHIFSNDEKSYRTSLKSRLTISKDTSKSQVVLTMTNMDPVDTATYYCARIVGYGSGWYAYFDYWGQGTLVTVSS

SEQ ID NO: 598 - protein, 107 aa, Artificial Sequence
  Synthetic peptide
DIQMTQSPSSLSASVGDRVTITCRASQGIRNDLGWYQQKPGKAPKRLIYAASSLQSGVPSRFSGSGSGTEFTLTISSLQPEDFATYYCLQHNSYPLTFGCGTKVEIK

SEQ ID NO: 599 - protein, 246 aa, Artificial Sequence
  Synthetic peptide
QVTLKESGPALVKPTQTLTLTCTFSGFSLSNARMGVSWIRQPPGKCLEWLAHIFSNDEKSYRTSLKSRLTISKDTSKSQVVLTMTNMDPVDTATYYCARIVGYGSGWYAYFDYWGQGTLVTVSSGGGGSGGGGSGGGGSDIQMTQSPSSLSASVGDRVTITCRASQGIRNDLGWYQQKPGKAPKRLIYAASSLQSGVPSRFSGSGSGTEFTLTISSLQPEDFATYYCLQHNSYPLTFGCGTKVEIK

SEQ ID NO: 600 - protein, 501 aa, Artificial Sequence
  Synthetic peptide
QVTLKESGPALVKPTQTLTLTCTFSGFSLSNARMGVSWIRQPPGKCLEWLAHIFSNDEKSYRTSLKSRLTISKDTSKSQVVLTMTNMDPVDTATYYCARIVGYGSGWYAYFDYWGQGTLVTVSSGGGGSGGGGSGGGGSDIQMTQSPSSLSASVGDRVTITCRASQGIRNDLGWYQQKPGKAPKRLIYAASSLQSGVPSRFSGSGSGTEFTLTISSLQPEDFATYYCLQHNSYPLTFGCGTKVEIKSGGGGSEVQLVESGGGLVQPGGSLKLSCAASGFTFNKYAMNWVRQAPGKGLEWVARIRSKYNNYATYYADSVKDRFTISRDDSKNTAYLQMNNLKTEDTAVYYCVRHGNFGNSYISYWAYWGQGTLVTVSSGGGGSGGGGSGGGGSQTVVTQEPSLTVSPGGTVTLTCGSSTGAVTSGNYPNWVQQKPGQAPRGLIGGTKFLAPGTPARFSGSLLGGKAALTLSGVQPEDEAEYYCVLWYSNRWVFGGGTKLTVL

SEQ ID NO: 601 - protein, 7 aa, Artificial Sequence
  Synthetic peptide
NARMGVS

SEQ ID NO: 602 - protein, 16 aa, Artificial Sequence
  Synthetic peptide
LIYWNDDKRYSPSLKS

SEQ ID NO: 603 - protein, 14 aa, Artificial Sequence
  Synthetic peptide
MVGYGSGWYAYFDY

SEQ ID NO: 604 - protein, 11 aa, Artificial Sequence
  Synthetic peptide
RASQGIRNDLG

SEQ ID NO: 605 - protein, 7 aa, Artificial Sequence
  Synthetic peptide
AASSLQS

SEQ ID NO: 606 - protein, 9 aa, Artificial Sequence
  Synthetic peptide
LQHNSYPLT

SEQ ID NO: 607 - protein, 124 aa, Artificial Sequence
  Synthetic peptide
QVTLKESGPVLVKPTQTLTLTCTFSGFSLSNARMGVSWIRQPPGKCLEWLALIYWNDDKRYSPSLKSRLTITKDTSKNQVVLTMTNMDPVDTATYYCARMVGYGSGWYAYFDYWGQGTLVTVSS

SEQ ID NO: 608 - protein, 107 aa, Artificial Sequence; identical to SEQ ID NO: 598
  Synthetic peptide

SEQ ID NO: 609 - protein, 246 aa, Artificial Sequence
  Synthetic peptide
QVTLKESGPVLVKPTQTLTLTCTFSGFSLSNARMGVSWIRQPPGKCLEWLALIYWNDDKRYSPSLKSRLTITKDTSKNQVVLTMTNMDPVDTATYYCARMVGYGSGWYAYFDYWGQGTLVTVSSGGGGSGGGGSGGGGSDIQMTQSPSSLSASVGDRVTITCRASQGIRNDLGWYQQKPGKAPKRLIYAASSLQSGVPSRFSGSGSGTEFTLTISSLQPEDFATYYCLQHNSYPLTFGCGTKVEIK

SEQ ID NO: 610 - protein, 501 aa, Artificial Sequence
  Synthetic peptide
QVTLKESGPVLVKPTQTLTLTCTFSGFSLSNARMGVSWIRQPPGKCLEWLALIYWNDDKRYSPSLKSRLTITKDTSKNQVVLTMTNMDPVDTATYYCARMVGYGSGWYAYFDYWGQGTLVTVSSGGGGSGGGGSGGGGSDIQMTQSPSSLSASVGDRVTITCRASQGIRNDLGWYQQKPGKAPKRLIYAASSLQSGVPSRFSGSGSGTEFTLTISSLQPEDFATYYCLQHNSYPLTFGCGTKVEIKSGGGGSEVQLVESGGGLVQPGGSLKLSCAASGFTFNKYAMNWVRQAPGKGLEWVARIRSKYNNYATYYADSVKDRFTISRDDSKNTAYLQMNNLKTEDTAVYYCVRHGNFGNSYISYWAYWGQGTLVTVSSGGGGSGGGGSGGGGSQTVVTQEPSLTVSPGGTVTLTCGSSTGAVTSGNYPNWVQQKPGQAPRGLIGGTKFLAPGTPARFSGSLLGGKAALTLSGVQPEDEAEYYCVLWYSNRWVFGGGTKLTVL

SEQ ID NO: 611 - protein, 7 aa, Artificial Sequence
  Synthetic peptide
NARMGVS

SEQ ID NO: 612 - protein, 16 aa, Artificial Sequence
  Synthetic peptide
HIFSNDEKSYSTSLKS

SEQ ID NO: 613 - protein, 14 aa, Artificial Sequence
  Synthetic peptide
IVGYGTGWYGFFDY

SEQ ID NO: 614 - protein, 11 aa, Artificial Sequence
  Synthetic peptide
RTSQGIRNDLG

SEQ ID NO: 615 - protein, 7 aa, Artificial Sequence
  Synthetic peptide
AASSLQS

SEQ ID NO: 616 - protein, 9 aa, Artificial Sequence
  Synthetic peptide
LQHNSYPLT

SEQ ID NO: 617 - protein, 124 aa, Artificial Sequence
  Synthetic peptide
QVTLKESGPALVKPTQTLTLTCTFSGFSLSNARMGVSWIRQPPGKCLEWLAHIFSNDEKSYSTSLKSRLTISKDTSKSQVVLTMTDMDPEDTATYYCARIVGYGTGWYGFFDYWGQGILVTVSS

SEQ ID NO: 618 - protein, 107 aa, Artificial Sequence
  Synthetic peptide
DIQMTQSPSSLSASVGDRVTITCRTSQGIRNDLGWYQQKPGKAPKRLIYAASSLQSGVPSRFSGSGSGTEFTLTISSLQPEDFATYYCLQHNSYPLTFGCGTKVEIK

SEQ ID NO: 619 - protein, 246 aa, Artificial Sequence
  Synthetic peptide
QVTLKESGPALVKPTQTLTLTCTFSGFSLSNARMGVSWIRQPPGKCLEWLAHIFSNDEKSYSTSLKSRLTISKDTSKSQVVLTMTDMDPEDTATYYCARIVGYGTGWYGFFDYWGQGILVTVSSGGGGSGGGGSGGGGSDIQMTQSPSSLSASVGDRVTITCRTSQGIRNDLGWYQQKPGKAPKRLIYAASSLQSGVPSRFSGSGSGTEFTLTISSLQPEDFATYYCLQHNSYPLTFGCGTKVEIK

SEQ ID NO: 620 - protein, 501 aa, Artificial Sequence
  Synthetic peptide
QVTLKESGPALVKPTQTLTLTCTFSGFSLSNARMGVSWIRQPPGKCLEWLAHIFSNDEKSYSTSLKSRLTISKDTSKSQVVLTMTDMDPEDTATYYCARIVGYGTGWYGFFDYWGQGILVTVSSGGGGSGGGGSGGGGSDIQMTQSPSSLSASVGDRVTITCRTSQGIRNDLGWYQQKPGKAPKRLIYAASSLQSGVPSRFSGSGSGTEFTLTISSLQPEDFATYYCLQHNSYPLTFGCGTKVEIKSGGGGSEVQLVESGGGLVQPGGSLKLSCAASGFTFNKYAMNWVRQAPGKGLEWVARIRSKYNNYATYYADSVKDRFTISRDDSKNTAYLQMNNLKTEDTAVYYCVRHGNFGNSYISYWAYWGQGTLVTVSSGGGGSGGGGSGGGGSQTVVTQEPSLTVSPGGTVTLTCGSSTGAVTSGNYPNWVQQKPGQAPRGLIGGTKFLAPGTPARFSGSLLGGKAALTLSGVQPEDEAEYYCVLWYSNRWVFGGGTKLTVL

SEQ ID NO: 621 - protein, 7 aa, Artificial Sequence
  Synthetic peptide
NARMGVS

SEQ ID NO: 622 - protein, 16 aa, Artificial Sequence
  Synthetic peptide
HIFWNDEKSYSTSLKS

SEQ ID NO: 623 - protein, 15 aa, Artificial Sequence
  Synthetic peptide
IPYYGSGSYNYGMDV

SEQ ID NO: 624 - protein, 11 aa, Artificial Sequence
  Synthetic peptide
RASQGIRNDLG

SEQ ID NO: 625 - protein, 7 aa, Artificial Sequence
  Synthetic peptide
AASSLQS

SEQ ID NO: 626 - protein, 9 aa, Artificial Sequence
  Synthetic peptide
LQHNTYPLT

SEQ ID NO: 627 - protein, 125 aa, Artificial Sequence
  Synthetic peptide
QVTLKESGPMLVKPTETLTLTCTFSGFSLRNARMGVSWIRQPPGKCLEWLAHIFWNDEKSYSTSLKSRLTISKDTSKSQVVLTMTNMDPVDTATYYCARIPYYGSGSYNYGMDVWGQGTTVTVSS

SEQ ID NO: 628 - protein, 107 aa, Artificial Sequence
  Synthetic peptide
DIQMTQSPSSLSASVGDRVTITCRASQGIRNDLGWYQQKPGKAPKRLIYAASSLQSGVPSRFSGSGSGTEFTLTISSLQPEDFATYYCLQHNTYPLTFGCGTKVDIK

SEQ ID NO: 629 - protein, 247 aa, Artificial Sequence
  Synthetic peptide
QVTLKESGPMLVKPTETLTLTCTFSGFSLRNARMGVSWIRQPPGKCLEWLAHIFWNDEKSYSTSLKSRLTISKDTSKSQVVLTMTNMDPVDTATYYCARIPYYGSGSYNYGMDVWGQGTTVTVSSGGGGSGGGGSGGGGSDIQMTQSPSSLSASVGDRVTITCRASQGIRNDLGWYQQKPGKAPKRLIYAASSLQSGVPSRFSGSGSGTEFTLTISSLQPEDFATYYCLQHNTYPLTFGCGTKVDIK

SEQ ID NO: 630 - protein, 502 aa, Artificial Sequence
  Synthetic peptide
QVTLKESGPMLVKPTETLTLTCTFSGFSLRNARMGVSWIRQPPGKCLEWLAHIFWNDEKSYSTSLKSRLTISKDTSKSQVVLTMTNMDPVDTATYYCARIPYYGSGSYNYGMDVWGQGTTVTVSSGGGGSGGGGSGGGGSDIQMTQSPSSLSASVGDRVTITCRASQGIRNDLGWYQQKPGKAPKRLIYAASSLQSGVPSRFSGSGSGTEFTLTISSLQPEDFATYYCLQHNTYPLTFGCGTKVDIKSGGGGSEVQLVESGGGLVQPGGSLKLSCAASGFTFNKYAMNWVRQAPGKGLEWVARIRSKYNNYATYYADSVKDRFTISRDDSKNTAYLQMNNLKTEDTAVYYCVRHGNFGNSYISYWAYWGQGTLVTVSSGGGGSGGGGSGGGGSQTVVTQEPSLTVSPGGTVTLTCGSSTGAVTSGNYPNWVQQKPGQAPRGLIGGTKFLAPGTPARFSGSLLGGKAALTLSGVQPEDEAEYYCVLWYSNRWVFGGGTKLTVL

SEQ ID NO: 631 - protein, 7 aa, Artificial Sequence
  Synthetic peptide
NARMGVS

SEQ ID NO: 632 - protein, 16 aa, Artificial Sequence
  Synthetic peptide
HIFSNDEKSYSTSLKN

SEQ ID NO: 633 - protein, 14 aa, Artificial Sequence
  Synthetic peptide
IVGYGTGWFGYFDY

SEQ ID NO: 634 - protein, 11 aa, Artificial Sequence
  Synthetic peptide
RASQDIRTDLA

SEQ ID NO: 635 - protein, 7 aa, Artificial Sequence
  Synthetic peptide
AASSLQS

SEQ ID NO: 636 - protein, 9 aa, Artificial Sequence
  Synthetic peptide
LQHNRYPLT

SEQ ID NO: 637 - protein, 124 aa, Artificial Sequence
  Synthetic peptide
QVTLKESGPTLVKPTETLTLTCTVSGFSLNNARMGVSWIRQPPGKCLEWLAHIFSNDEKSYSTSLKNRLTISKDSSKTQVVLTMTNVDPVDTATYYCARIVGYGTGWFGYFDYWGQGTQVTVSS

SEQ ID NO: 638 - protein, 107 aa, Artificial Sequence
  Synthetic peptide
DIQMTQSPSSLSASVGDRVTITCRASQDIRTDLAWYQQKPGKAPKRLIYAASSLQSGVPSRFSGSGSGTEFTLTISSLQPEDFATYYCLQHNRYPLTFGCGTKVDIK

SEQ ID NO: 639 - protein, 246 aa, Artificial Sequence
  Synthetic peptide
QVTLKESGPTLVKPTETLTLTCTVSGFSLNNARMGVSWIRQPPGKCLEWLAHIFSNDEKSYSTSLKNRLTISKDSSKTQVVLTMTNVDPVDTATYYCARIVGYGTGWFGYFDYWGQGTQVTVSSGGGGSGGGGSGGGGSDIQMTQSPSSLSASVGDRVTITCRASQDIRTDLAWYQQKPGKAPKRLIYAASSLQSGVPSRFSGSGSGTEFTLTISSLQPEDFATYYCLQHNRYPLTFGCGTKVDIK

SEQ ID NO: 640 - protein, 501 aa, Artificial Sequence
  Synthetic peptide
QVTLKESGPTLVKPTETLTLTCTVSGFSLNNARMGVSWIRQPPGKCLEWLAHIFSNDEKSYSTSLKNRLTISKDSSKTQVVLTMTNVDPVDTATYYCARIVGYGTGWFGYFDYWGQGTQVTVSSGGGGSGGGGSGGGGSDIQMTQSPSSLSASVGDRVTITCRASQDIRTDLAWYQQKPGKAPKRLIYAASSLQSGVPSRFSGSGSGTEFTLTISSLQPEDFATYYCLQHNRYPLTFGCGTKVDIKSGGGGSEVQLVESGGGLVQPGGSLKLSCAASGFTFNKYAMNWVRQAPGKGLEWVARIRSKYNNYATYYADSVKDRFTISRDDSKNTAYLQMNNLKTEDTAVYYCVRHGNFGNSYISYWAYWGQGTLVTVSSGGGGSGGGGSGGGGSQTVVTQEPSLTVSPGGTVTLTCGSSTGAVTSGNYPNWVQQKPGQAPRGLIGGTKFLAPGTPARFSGSLLGGKAALTLSGVQPEDEAEYYCVLWYSNRWVFGGGTKLTVL

SEQ ID NO: 641 - protein, 7 aa, Artificial Sequence
  Synthetic peptide
NARMGVS

SEQ ID NO: 642 - protein, 16 aa, Artificial Sequence
  Synthetic peptide
HIFSNDEKSYSTSLKS

SEQ ID NO: 643 - protein, 17 aa, Artificial Sequence
  Synthetic peptide
IPGYGGNFYYHYYGMDV

SEQ ID NO: 644 - protein, 11 aa, Artificial Sequence
  Synthetic peptide
RASQGIRNDLA

SEQ ID NO: 645 - protein, 7 aa, Artificial Sequence
  Synthetic peptide
AASTVQS

SEQ ID NO: 646 - protein, 9 aa, Artificial Sequence
  Synthetic peptide
LQHNSFPWT

SEQ ID NO: 647 - protein, 127 aa, Artificial Sequence
  Synthetic peptide
QVTLKESGPTLVKPTETLTLTCTVSGFSLSNARMGVSWIRQPPGKCLEWLAHIFSNDEKSYSTSLKSRLTISKDTSKSQVVLTMTNMDPVDTATYYCARIPGYGGNFYYHYYGMDVWGQGTTVTVSS

SEQ ID NO: 648 - protein, 107 aa, Artificial Sequence
  Synthetic peptide
DIQMTQSPSSLSASVGDRVTITCRASQGIRNDLAWYQQKPGKAPKRLIYAASTVQSGVPSRFSGSGSGTEFALTISSLQPEDFATYYCLQHNSFPWTFGCGTKVDIK

SEQ ID NO: 649 - protein, 249 aa, Artificial Sequence
  Synthetic peptide
QVTLKESGPTLVKPTETLTLTCTVSGFSLSNARMGVSWIRQPPGKCLEWLAHIFSNDEKSYSTSLKSRLTISKDTSKSQVVLTMTNMDPVDTATYYCARIPGYGGNFYYHYYGMDVWGQGTTVTVSSGGGGSGGGGSGGGGSDIQMTQSPSSLSASVGDRVTITCRASQGIRNDLAWYQQKPGKAPKRLIYAASTVQSGVPSRFSGSGSGTEFALTISSLQPEDFATYYCLQHNSFPWTFGCGTKVDIK

SEQ ID NO: 650 - protein, 504 aa, Artificial Sequence
  Synthetic peptide
QVTLKESGPTLVKPTETLTLTCTVSGFSLSNARMGVSWIRQPPGKCLEWLAHIFSNDEKSYSTSLKSRLTISKDTSKSQVVLTMTNMDPVDTATYYCARIPGYGGNFYYHYYGMDVWGQGTTVTVSSGGGGSGGGGSGGGGSDIQMTQSPSSLSASVGDRVTITCRASQGIRNDLAWYQQKPGKAPKRLIYAASTVQSGVPSRFSGSGSGTEFALTISSLQPEDFATYYCLQHNSFPWTFGCGTKVDIKSGGGGSEVQLVESGGGLVQPGGSLKLSCAASGFTFNKYAMNWVRQAPGKGLEWVARIRSKYNNYATYYADSVKDRFTISRDDSKNTAYLQMNNLKTEDTAVYYCVRHGNFGNSYISYWAYWGQGTLVTVSSGGGGSGGGGSGGGGSQTVVTQEPSLTVSPGGTVTLTCGSSTGAVTSGNYPNWVQQKPGQAPRGLIGGTKFLAPGTPARFSGSLLGGKAALTLSGVQPEDEAEYYCVLWYSNRWVFGGGTKLTVL

SEQ ID NO: 651 - protein, 7 aa, Artificial Sequence
  Synthetic peptide
NVRMGVS

SEQ ID NO: 652 - protein, 16 aa, Artificial Sequence
  Synthetic peptide
HISSNDEKSYSTSLRS

SEQ ID NO: 653 - protein, 14 aa, Artificial Sequence
  Synthetic peptide
MPGDSNTWRGFFDY

SEQ ID NO: 654 - protein, 11 aa, Artificial Sequence
  Synthetic peptide
RTSQSVNNNLA

SEQ ID NO: 655 - protein, 7 aa, Artificial Sequence
  Synthetic peptide
GASTRAT

SEQ ID NO: 656 - protein, 9 aa, Artificial Sequence
  Synthetic peptide
LQHNSYPLT

SEQ ID NO: 657 - protein, 124 aa, Artificial Sequence
  Synthetic peptide
QVTLKESGPTLVKPTETLTLTCTVSGFSLRNVRMGVSWIRQPPGKCLEWLAHISSNDEKSYSTSLRSRLTISTDTSKSQVVLTMTNMDPVDTATYYCARMPGDSNTWRGFFDYWGQGTLVTVSS

SEQ ID NO: 658 - protein, 107 aa, Artificial Sequence
  Synthetic peptide
EIVMTQSPATLSVSPGERATLSCRTSQSVNNNLAWYQQKPGQAPRLLIYGASTRATGIPARFSGSGSGTEFTLTISSLQPEDFATYYCLQHNSYPLTFGCGTKVEIK

SEQ ID NO: 659 - protein, 246 aa, Artificial Sequence
  Synthetic peptide
QVTLKESGPTLVKPTETLTLTCTVSGFSLRNVRMGVSWIRQPPGKCLEWLAHISSNDEKSYSTSLRSRLTISTDTSKSQVVLTMTNMDPVDTATYYCARMPGDSNTWRGFFDYWGQGTLVTVSSGGGGSGGGGSGGGGSEIVMTQSPATLSVSPGERATLSCRTSQSVNNNLAWYQQKPGQAPRLLIYGASTRATGIPARFSGSGSGTEFTLTISSLQPEDFATYYCLQHNSYPLTFGCGTKVEIK

SEQ ID NO: 660 - protein, 501 aa, Artificial Sequence
  Synthetic peptide
QVTLKESGPTLVKPTETLTLTCTVSGFSLRNVRMGVSWIRQPPGKCLEWLAHISSNDEKSYSTSLRSRLTISTDTSKSQVVLTMTNMDPVDTATYYCARMPGDSNTWRGFFDYWGQGTLVTVSSGGGGSGGGGSGGGGSEIVMTQSPATLSVSPGERATLSCRTSQSVNNNLAWYQQKPGQAPRLLIYGASTRATGIPARFSGSGSGTEFTLTISSLQPEDFATYYCLQHNSYPLTFGCGTKVEIKSGGGGSEVQLVESGGGLVQPGGSLKLSCAASGFTFNKYAMNWVRQAPGKGLEWVARIRSKYNNYATYYADSVKDRFTISRDDSKNTAYLQMNNLKTEDTAVYYCVRHGNFGNSYISYWAYWGQGTLVTVSSGGGGSGGGGSGGGGSQTVVTQEPSLTVSPGGTVTLTCGSSTGAVTSGNYPNWVQQKPGQAPRGLIGGTKFLAPGTPARFSGSLLGGKAALTLSGVQPEDEAEYYCVLWYSNRWVFGGGTKLTVL

SEQ ID NO: 661 - protein, 7 aa, Artificial Sequence
  Synthetic peptide
YARMGVS

SEQ ID NO: 662 - protein, 16 aa, Artificial Sequence
  Synthetic peptide
HIFSNDEKSYSTSLKS

SEQ ID NO: 663 - protein, 14 aa, Artificial Sequence
  Synthetic peptide
MPEYSSGWSGAFDI

SEQ ID NO: 664 - protein, 11 aa, Artificial Sequence
  Synthetic peptide
RASQDIRNDLA

SEQ ID NO: 665 - protein, 7 aa, Artificial Sequence
  Synthetic peptide
AASSLQS

SEQ ID NO: 666 - protein, 9 aa, Artificial Sequence
  Synthetic peptide
LQHNSYPLT

SEQ ID NO: 667 - protein, 124 aa, Artificial Sequence
  Synthetic peptide
QVTLKESGPTLVKPTETLTLTCTFSGFSLRYARMGVSWIRQPPGKCLEWLAHIFSNDEKSYSTSLKSRLTISKDTSKSQVVLTLTNMDPVDTATYFCARMPEYSSGWSGAFDIWGQGTMVTVSS

SEQ ID NO: 668 - protein, 107 aa, Artificial Sequence
  Synthetic peptide
DIQMTQSPSSLSASVGDRVTITCRASQDIRNDLAWYQQKPGKAPKRLIYAASSLQSGVPSRFSGSGSGTEFTLTISSLQPEDFATYYCLQHNSYPLTFGCGTKLEIK

SEQ ID NO: 669 - protein, 246 aa, Artificial Sequence
  Synthetic peptide
QVTLKESGPTLVKPTETLTLTCTFSGFSLRYARMGVSWIRQPPGKCLEWLAHIFSNDEKSYSTSLKSRLTISKDTSKSQVVLTLTNMDPVDTATYFCARMPEYSSGWSGAFDIWGQGTMVTVSSGGGGSGGGGSGGGGSDIQMTQSPSSLSASVGDRVTITCRASQDIRNDLAWYQQKPGKAPKRLIYAASSLQSGVPSRFSGSGSGTEFTLTISSLQPEDFATYYCLQHNSYPLTFGCGTKLEIK

SEQ ID NO: 670 - protein, 501 aa, Artificial Sequence
  Synthetic peptide
QVTLKESGPTLVKPTETLTLTCTFSGFSLRYARMGVSWIRQPPGKCLEWLAHIFSNDEKSYSTSLKSRLTISKDTSKSQVVLTLTNMDPVDTATYFCARMPEYSSGWSGAFDIWGQGTMVTVSSGGGGSGGGGSGGGGSDIQMTQSPSSLSASVGDRVTITCRASQDIRNDLAWYQQKPGKAPKRLIYAASSLQSGVPSRFSGSGSGTEFTLTISSLQPEDFATYYCLQHNSYPLTFGCGTKLEIKSGGGGSEVQLVESGGGLVQPGGSLKLSCAASGFTFNKYAMNWVRQAPGKGLEWVARIRSKYNNYATYYADSVKDRFTISRDDSKNTAYLQMNNLKTEDTAVYYCVRHGNFGNSYISYWAYWGQGTLVTVSSGGGGSGGGGSGGGGSQTVVTQEPSLTVSPGGTVTLTCGSSTGAVTSGNYPNWVQQKPGQAPRGLIGGTKFLAPGTPARFSGSLLGGKAALTLSGVQPEDEAEYYCVLWYSNRWVFGGGTKLTVL

SEQ ID NO: 671 - protein, 5 aa, Artificial Sequence
  Synthetic peptide
SYGMH

SEQ ID NO: 672 - protein, 17 aa, Artificial Sequence
  Synthetic peptide
VISYDGSNEFYADSVKG

SEQ ID NO: 673 - protein, 20 aa, Artificial Sequence
  Synthetic peptide
GGEITMVRGVIGYYYYGMDV

SEQ ID NO: 674 - protein, 11 aa, Artificial Sequence
  Synthetic peptide
RTSQSISSYLN

SEQ ID NO: 675 - protein, 7 aa, Artificial Sequence
  Synthetic peptide
AASSLQS

SEQ ID NO: 676 - protein, 9 aa, Artificial Sequence
  Synthetic peptide
LQHNSYPLT

SEQ ID NO: 677 - protein, 129 aa, Artificial Sequence
  Synthetic peptide
QVQLVESGGGVVQPGRSLRLSCAASGFTFSSYGMHWVRQAPGKCLEWVAVISYDGSNEFYADSVKGRFTISRDNSKNTLYLQMNSLRAEDTAVYYCARGGEITMVRGVIGYYYYGMDVWGQGTTVTVSS

SEQ ID NO: 678 - protein, 107 aa, Artificial Sequence
  Synthetic peptide
DIQMTQSPSSLSASVGDRVTITCRTSQSISSYLNWYQQKPGKAPKLLIYAASSLQSGVPSRFSGSGSGTEFTLTISSLQPEDFATYYCLQHNSYPLTFGCGTKVDIK

SEQ ID NO: 679 - protein, 251 aa, Artificial Sequence
  Synthetic peptide
QVQLVESGGGVVQPGRSLRLSCAASGFTFSSYGMHWVRQAPGKCLEWVAVISYDGSNEFYADSVKGRFTISRDNSKNTLYLQMNSLRAEDTAVYYCARGGEITMVRGVIGYYYYGMDVWGQGTTVTVSSGGGGSGGGGSGGGGSDIQMTQSPSSLSASVGDRVTITCRTSQSISSYLNWYQQKPGKAPKLLIYAASSLQSGVPSRFSGSGSGTEFTLTISSLQPEDFATYYCLQHNSYPLTFGCGTKVDIK

SEQ ID NO: 680 - protein, 506 aa, Artificial Sequence
  Synthetic peptide
QVQLVESGGGVVQPGRSLRLSCAASGFTFSSYGMHWVRQAPGKCLEWVAVISYDGSNEFYADSVKGRFTISRDNSKNTLYLQMNSLRAEDTAVYYCARGGEITMVRGVIGYYYYGMDVWGQGTTVTVSSGGGGSGGGGSGGGGSDIQMTQSPSSLSASVGDRVTITCRTSQSISSYLNWYQQKPGKAPKLLIYAASSLQSGVPSRFSGSGSGTEFTLTISSLQPEDFATYYCLQHNSYPLTFGCGTKVDIKSGGGGSEVQLVESGGGLVQPGGSLKLSCAASGFTFNKYAMNWVRQAPGKGLEWVARIRSKYNNYATYYADSVKDRFTISRDDSKNTAYLQMNNLKTEDTAVYYCVRHGNFGNSYISYWAYWGQGTLVTVSSGGGGSGGGGSGGGGSQTVVTQEPSLTVSPGGTVTLTCGSSTGAVTSGNYPNWVQQKPGQAPRGLIGGTKFLAPGTPARFSGSLLGGKAALTLSGVQPEDEAEYYCVLWYSNRWVFGGGTKLTVL

SEQ ID NO: 681 - protein, 5 aa, Artificial Sequence
  Synthetic peptide
SYGMH

SEQ ID NO: 682 - protein, 17 aa, Artificial Sequence
  Synthetic peptide
VISYDGSNEFYADSVKG

SEQ ID NO: 683 - protein, 20 aa, Artificial Sequence
  Synthetic peptide
GGEITMVRGVIGYYYYGMDV

SEQ ID NO: 684 - protein, 11 aa, Artificial Sequence
  Synthetic peptide
RASQGVRNNLV

SEQ ID NO: 685 - protein, 7 aa, Artificial Sequence
  Synthetic peptide
GASTRAT

SEQ ID NO: 686 - protein, 9 aa, Artificial Sequence
  Synthetic peptide
LQHNSYPLT

SEQ ID NO: 687 - protein, 129 aa, Artificial Sequence; identical to SEQ ID NO: 677
  Synthetic peptide

SEQ ID NO: 688 - protein, 107 aa, Artificial Sequence
  Synthetic peptide
EIVMTQSPATLSVSPGERATLSCRASQGVRNNLVWYQQKPGQAPRLLIYGASTRATGIPARFSGSGSGTEFTLTISSLQSEDFATYYCLQHNSYPLTFGCGTKVEIK

SEQ ID NO: 689 - protein, 251 aa, Artificial Sequence
  Synthetic peptide
QVQLVESGGGVVQPGRSLRLSCAASGFTFSSYGMHWVRQAPGKCLEWVAVISYDGSNEFYADSVKGRFTISRDNSKNTLYLQMNSLRAEDTAVYYCARGGEITMVRGVIGYYYYGMDVWGQGTTVTVSSGGGGSGGGGSGGGGSEIVMTQSPATLSVSPGERATLSCRASQGVRNNLVWYQQKPGQAPRLLIYGASTRATGIPARFSGSGSGTEFTLTISSLQSEDFATYYCLQHNSYPLTFGCGTKVEIK

SEQ ID NO: 690 - protein, 506 aa, Artificial Sequence
  Synthetic peptide
QVQLVESGGGVVQPGRSLRLSCAASGFTFSSYGMHWVRQAPGKCLEWVAVISYDGSNEFYADSVKGRFTISRDNSKNTLYLQMNSLRAEDTAVYYCARGGEITMVRGVIGYYYYGMDVWGQGTTVTVSSGGGGSGGGGSGGGGSEIVMTQSPATLSVSPGERATLSCRASQGVRNNLVWYQQKPGQAPRLLIYGASTRATGIPARFSGSGSGTEFTLTISSLQSEDFATYYCLQHNSYPLTFGCGTKVEIKSGGGGSEVQLVESGGGLVQPGGSLKLSCAASGFTFNKYAMNWVRQAPGKGLEWVARIRSKYNNYATYYADSVKDRFTISRDDSKNTAYLQMNNLKTEDTAVYYCVRHGNFGNSYISYWAYWGQGTLVTVSSGGGGSGGGGSGGGGSQTVVTQEPSLTVSPGGTVTLTCGSSTGAVTSGNYPNWVQQKPGQAPRGLIGGTKFLAPGTPARFSGSLLGGKAALTLSGVQPEDEAEYYCVLWYSNRWVFGGGTKLTVL

SEQ ID NO: 691 - protein, 5 aa, Artificial Sequence
  Synthetic peptide
SYGMH

SEQ ID NO: 692 - protein, 17 aa, Artificial Sequence
  Synthetic peptide
VISYDGSNKYYADSVKG

SEQ ID NO: 693 - protein, 6 aa, Artificial Sequence
  Synthetic peptide
SYGMDV

SEQ ID NO: 694 - protein, 11 aa, Artificial Sequence
  Synthetic peptide
RASQGISSWLA

SEQ ID NO: 695 - protein, 7 aa, Artificial Sequence
  Synthetic peptide
AASSLQS

SEQ ID NO: 696 - protein, 9 aa, Artificial Sequence
  Synthetic peptide
QQANSFPWT

SEQ ID NO: 697 - protein, 115 aa, Artificial Sequence
  Synthetic peptide
QVQLVESGGGVVQPGRSLRLSCAASGFTFSSYGMHWVRQAPGKCLEWVAVISYDGSNKYYADSVKGRFTISRDNSKNTLYLQMNSLRAEDTAVYYCARSYGMDVWGQGTTVTVSS

SEQ ID NO: 698 - protein, 107 aa, Artificial Sequence
  Synthetic peptide
DIQMTQSPSSVSASVGDRVTITCRASQGISSWLAWYQQKPGKAPKLLIYAASSLQSGVPSRFSGSGSGTDFTLTISSLQPEDFATYYCQQANSFPWTFGCGTKLEIK

SEQ ID NO: 699 - protein, 237 aa, Artificial Sequence
  Synthetic peptide
QVQLVESGGGVVQPGRSLRLSCAASGFTFSSYGMHWVRQAPGKCLEWVAVISYDGSNKYYADSVKGRFTISRDNSKNTLYLQMNSLRAEDTAVYYCARSYGMDVWGQGTTVTVSSGGGGSGGGGSGGGGSDIQMTQSPSSVSASVGDRVTITCRASQGISSWLAWYQQKPGKAPKLLIYAASSLQSGVPSRFSGSGSGTDFTLTISSLQPEDFATYYCQQANSFPWTFGCGTKLEIK

SEQ ID NO: 700 - protein, 492 aa, Artificial Sequence
  Synthetic peptide
QVQLVESGGGVVQPGRSLRLSCAASGFTFSSYGMHWVRQAPGKCLEWVAVISYDGSNKYYADSVKGRFTISRDNSKNTLYLQMNSLRAEDTAVYYCARSYGMDVWGQGTTVTVSSGGGGSGGGGSGGGGSDIQMTQSPSSVSASVGDRVTITCRASQGISSWLAWYQQKPGKAPKLLIYAASSLQSGVPSRFSGSGSGTDFTLTISSLQPEDFATYYCQQANSFPWTFGCGTKLEIKSGGGGSEVQLVESGGGLVQPGGSLKLSCAASGFTFNKYAMNWVRQAPGKGLEWVARIRSKYNNYATYYADSVKDRFTISRDDSKNTAYLQMNNLKTEDTAVYYCVRHGNFGNSYISYWAYWGQGTLVTVSSGGGGSGGGGSGGGGSQTVVTQEPSLTVSPGGTVTLTCGSSTGAVTSGNYPNWVQQKPGQAPRGLIGGTKFLAPGTPARFSGSLLGGKAALTLSGVQPEDEAEYYCVLWYSNRWVFGGGTKLTVL

SEQ ID NO: 701 - protein, 7 aa, Artificial Sequence
  Synthetic peptide
NVRMGVS

SEQ ID NO: 702 - protein, 16 aa, Artificial Sequence
  Synthetic peptide
HIFSNDEKLYTTSLKS

SEQ ID NO: 703 - protein, 14 aa, Artificial Sequence
  Synthetic peptide
IVGYGTGWYGYFDY

SEQ ID NO: 704 - protein, 11 aa, Artificial Sequence
  Synthetic peptide
RASQDIRDDLG

SEQ ID NO: 705 - protein, 7 aa, Artificial Sequence
  Synthetic peptide
ATSIRQS

SEQ ID NO: 706 - protein, 9 aa, Artificial Sequence
  Synthetic peptide
LQHHSFPLT

SEQ ID NO: 707 - protein, 124 aa, Artificial Sequence
  Synthetic peptide
QVTLKESGPVLVKPTETLTLTCTVSGFSLRNVRMGVSWIRQPPGKALEWLAHIFSNDEKLYTTSLKSRLTISKDTSKSQVVLTMTNMDPEDTATYYCARIVGYGTGWYGYFDYWGQGTQVTVSS

SEQ ID NO: 708 - protein, 107 aa, Artificial Sequence
  Synthetic peptide
DIQMTQSPSSLSASIGDRVTITCRASQDIRDDLGWYQREPGKAPKRLIYATSIRQSGVPSRFSGSGSGTEFTLTISGLQPEDFATYFCLQHHSFPLTFGGGTKVDIK

SEQ ID NO: 709 - protein, 246 aa, Artificial Sequence
  Synthetic peptide
QVTLKESGPVLVKPTETLTLTCTVSGFSLRNVRMGVSWIRQPPGKALEWLAHIFSNDEKLYTTSLKSRLTISKDTSKSQVVLTMTNMDPEDTATYYCARIVGYGTGWYGYFDYWGQGTQVTVSSGGGGSGGGGSGGGGSDIQMTQSPSSLSASIGDRVTITCRASQDIRDDLGWYQREPGKAPKRLIYATSIRQSGVPSRFSGSGSGTEFTLTISGLQPEDFATYFCLQHHSFPLTFGGGTKVDIK

SEQ ID NO: 710 - protein, 501 aa, Artificial Sequence
  Synthetic peptide
QVTLKESGPVLVKPTETLTLTCTVSGFSLRNVRMGVSWIRQPPGKALEWLAHIFSNDEKLYTTSLKSRLTISKDTSKSQVVLTMTNMDPEDTATYYCARIVGYGTGWYGYFDYWGQGTQVTVSSGGGGSGGGGSGGGGSDIQMTQSPSSLSASIGDRVTITCRASQDIRDDLGWYQREPGKAPKRLIYATSIRQSGVPSRFSGSGSGTEFTLTISGLQPEDFATYFCLQHHSFPLTFGGGTKVDIKSGGGGSEVQLVESGGGLVQPGGSLKLSCAASGFTFNKYAMNWVRQAPGKGLEWVARIRSKYNNYATYYADSVKDRFTISRDDSKNTAYLQMNNLKTEDTAVYYCVRHGNFGNSYISYWAYWGQGTLVTVSSGGGGSGGGGSGGGGSQTVVTQEPSLTVSPGGTVTLTCGSSTGAVTSGNYPNWVQQKPGQAPRGLIGGTKFLAPGTPARFSGSLLGGKAALTLSGVQPEDEAEYYCVLWYSNRWVFGGGTKLTVL

SEQ ID NO: 711 - protein, 7 aa, Artificial Sequence
  Synthetic peptide
YARMGVS

SEQ ID NO: 712 - protein, 16 aa, Artificial Sequence
  Synthetic peptide
HISSNDEKSFSTALES

SEQ ID NO: 713 - protein, 14 aa, Artificial Sequence
  Synthetic peptide
MPGDSNTWRGFFDY

SEQ ID NO: 714 - protein, 12 aa, Artificial Sequence
  Synthetic peptide
RTSQTVTNSYIA

SEQ ID NO: 715 - protein, 7 aa, Artificial Sequence
  Synthetic peptide
GTSTRAT

SEQ ID NO: 716 - protein, 9 aa, Artificial Sequence
  Synthetic peptide
QKYGSSPLT

SEQ ID NO: 717 - protein, 124 aa, Artificial Sequence
  Synthetic peptide
QVTLKESGPTLVKPTETLTLTCTFSGFSLRYARMGVSWIRQPPGKALEWLAHISSNDEKSFSTALESRLTISTDTSKSQMVLTMTNVDPVDTATYYCARMPGDSNTWRGFFDYWGQGTLVTVSS

SEQ ID NO: 718 - protein, 108 aa, Artificial Sequence
  Synthetic peptide
EIVMTQSPGTLSLSPGERATLSCRTSQTVTNSYIAWYQQRPGQAPRLLIYGTSTRATGIPDRFSGSGSGTDFTLTISRLEPEDFAVYYCQKYGSSPLTFGGGTKLEIK

SEQ ID NO: 719 - protein, 247 aa, Artificial Sequence
  Synthetic peptide
QVTLKESGPTLVKPTETLTLTCTFSGFSLRYARMGVSWIRQPPGKALEWLAHISSNDEKSFSTALESRLTISTDTSKSQMVLTMTNVDPVDTATYYCARMPGDSNTWRGFFDYWGQGTLVTVSSGGGGSGGGGSGGGGSEIVMTQSPGTLSLSPGERATLSCRTSQTVTNSYIAWYQQRPGQAPRLLIYGTSTRATGIPDRFSGSGSGTDFTLTISRLEPEDFAVYYCQKYGSSPLTFGGGTKLEIK

SEQ ID NO: 720 - protein, 502 aa, Artificial Sequence
  Synthetic peptide
QVTLKESGPTLVKPTETLTLTCTFSGFSLRYARMGVSWIRQPPGKALEWLAHISSNDEKSFSTALESRLTISTDTSKSQMVLTMTNVDPVDTATYYCARMPGDSNTWRGFFDYWGQGTLVTVSSGGGGSGGGGSGGGGSEIVMTQSPGTLSLSPGERATLSCRTSQTVTNSYIAWYQQRPGQAPRLLIYGTSTRATGIPDRFSGSGSGTDFTLTISRLEPEDFAVYYCQKYGSSPLTFGGGTKLEIKSGGGGSEVQLVESGGGLVQPGGSLKLSCAASGFTFNKYAMNWVRQAPGKGLEWVARIRSKYNNYATYYADSVKDRFTISRDDSKNTAYLQMNNLKTEDTAVYYCVRHGNFGNSYISYWAYWGQGTLVTVSSGGGGSGGGGSGGGGSQTVVTQEPSLTVSPGGTVTLTCGSSTGAVTSGNYPNWVQQKPGQAPRGLIGGTKFLAPGTPARFSGSLLGGKAALTLSGVQPEDEAEYYCVLWYSNRWVFGGGTKLTVL

SEQ ID NO: 721 - protein, 7 aa, Artificial Sequence
  Synthetic peptide
NVRMGVS

SEQ ID NO: 722 - protein, 16 aa, Artificial Sequence
  Synthetic peptide
HISSNDEKSYSTSLRS

SEQ ID NO: 723 - protein, 14 aa, Artificial Sequence
  Synthetic peptide
MPGDSNTWRGFFDY

SEQ ID NO: 724 - protein, 11 aa, Artificial Sequence
  Synthetic peptide
RTSQSVNNNLA

SEQ ID NO: 725 - protein, 7 aa, Artificial Sequence
  Synthetic peptide
GASTRAT

SEQ ID NO: 726 - protein, 9 aa, Artificial Sequence
  Synthetic peptide
LQHNSYPLT

SEQ ID NO: 727 - protein, 124 aa, Artificial Sequence
  Synthetic peptide
QVTLKESGPTLVKPTETLTLTCTVSGFSLRNVRMGVSWIRQPPGKALEWLAHISSNDEKSYSTSLRSRLTISTDTSKSQVVLTMTNMDPVDTATYYCARMPGDSNTWRGFFDYWGQGTLVTVSS

SEQ ID NO: 728 - protein, 107 aa, Artificial Sequence
  Synthetic peptide
EIVMTQSPATLSVSPGERATLSCRTSQSVNNNLAWYQQKPGQAPRLLIYGASTRATGIPARFSGSGSGTEFTLTISSLQPEDFATYYCLQHNSYPLTFGGGTKVEIK

SEQ ID NO: 729 - protein, 246 aa, Artificial Sequence
  Synthetic peptide
QVTLKESGPTLVKPTETLTLTCTVSGFSLRNVRMGVSWIRQPPGKALEWLAHISSNDEKSYSTSLRSRLTISTDTSKSQVVLTMTNMDPVDTATYYCARMPGDSNTWRGFFDYWGQGTLVTVSSGGGGSGGGGSGGGGSEIVMTQSPATLSVSPGERATLSCRTSQSVNNNLAWYQQKPGQAPRLLIYGASTRATGIPARFSGSGSGTEFTLTISSLQPEDFATYYCLQHNSYPLTFGGGTKVEIK

SEQ ID NO: 730 - protein, 501 aa, Artificial Sequence
  Synthetic peptide
QVTLKESGPTLVKPTETLTLTCTVSGFSLRNVRMGVSWIRQPPGKALEWLAHISSNDEKSYSTSLRSRLTISTDTSKSQVVLTMTNMDPVDTATYYCARMPGDSNTWRGFFDYWGQGTLVTVSSGGGGSGGGGSGGGGSEIVMTQSPATLSVSPGERATLSCRTSQSVNNNLAWYQQKPGQAPRLLIYGASTRATGIPARFSGSGSGTEFTLTISSLQPEDFATYYCLQHNSYPLTFGGGTKVEIKSGGGGSEVQLVESGGGLVQPGGSLKLSCAASGFTFNKYAMNWVRQAPGKGLEWVARIRSKYNNYATYYADSVKDRFTISRDDSKNTAYLQMNNLKTEDTAVYYCVRHGNFGNSYISYWAYWGQGTLVTVSSGGGGSGGGGSGGGGSQTVVTQEPSLTVSPGGTVTLTCGSSTGAVTSGNYPNWVQQKPGQAPRGLIGGTKFLAPGTPARFSGSLLGGKAALTLSGVQPEDEAEYYCVLWYSNRWVFGGGTKLTVL

SEQ ID NO: 731 - protein, 7 aa, Artificial Sequence
  Synthetic peptide
NVRMGVS

SEQ ID NO: 732 - protein, 16 aa, Artificial Sequence
  Synthetic peptide
HIFSNDEKSYSTSLKS

SEQ ID NO: 733 - protein, 14 aa, Artificial Sequence
  Synthetic peptide
MPEYSSGWSGAFDI

SEQ ID NO: 734 - protein, 11 aa, Artificial Sequence
  Synthetic peptide
RASQDIRDDLG

SEQ ID NO: 735 - protein, 7 aa, Artificial Sequence
  Synthetic peptide
GASTLQS

SEQ ID NO: 736 - protein, 9 aa, Artificial Sequence
  Synthetic peptide
LQHNSYPLT

SEQ ID NO: 737 - protein, 124 aa, Artificial Sequence
  Synthetic peptide
QVTLKESGPMLVKPTETLTLTCTVSGFSLRNVRMGVSWIRQPPGKALEWLAHIFSNDEKSYSTSLKSRLTISKDTSKSQVVLTLTNMDPVDTATYFCARMPEYSSGWSGAFDIWGQGTMVTVSS

SEQ ID NO: 738 - protein, 107 aa, Artificial Sequence
  Synthetic peptide
DIQMTQSPSSLSASVGDRVTITCRASQDIRDDLGWYQQKPGNAPKRLIYGASTLQSGVPSRFSGSGSGTEFTLTISSLQPEDFATYYCLQHNSYPLTFGGGTRLEIK

SEQ ID NO: 739 - protein, 246 aa, Artificial Sequence
  Synthetic peptide
QVTLKESGPMLVKPTETLTLTCTVSGFSLRNVRMGVSWIRQPPGKALEWLAHIFSNDEKSYSTSLKSRLTISKDTSKSQVVLTLTNMDPVDTATYFCARMPEYSSGWSGAFDIWGQGTMVTVSSGGGGSGGGGSGGGGSDIQMTQSPSSLSASVGDRVTITCRASQDIRDDLGWYQQKPGNAPKRLIYGASTLQSGVPSRFSGSGSGTEFTLTISSLQPEDFATYYCLQHNSYPLTFGGGTRLEIK

SEQ ID NO: 740 - protein, 501 aa, Artificial Sequence
  Synthetic peptide
QVTLKESGPMLVKPTETLTLTCTVSGFSLRNVRMGVSWIRQPPGKALEWLAHIFSNDEKSYSTSLKSRLTISKDTSKSQVVLTLTNMDPVDTATYFCARMPEYSSGWSGAFDIWGQGTMVTVSSGGGGSGGGGSGGGGSDIQMTQSPSSLSASVGDRVTITCRASQDIRDDLGWYQQKPGNAPKRLIYGASTLQSGVPSRFSGSGSGTEFTLTISSLQPEDFATYYCLQHNSYPLTFGGGTRLEIKSGGGGSEVQLVESGGGLVQPGGSLKLSCAASGFTFNKYAMNWVRQAPGKGLEWVARIRSKYNNYATYYADSVKDRFTISRDDSKNTAYLQMNNLKTEDTAVYYCVRHGNFGNSYISYWAYWGQGTLVTVSSGGGGSGGGGSGGGGSQTVVTQEPSLTVSPGGTVTLTCGSSTGAVTSGNYPNWVQQKPGQAPRGLIGGTKFLAPGTPARFSGSLLGGKAALTLSGVQPEDEAEYYCVLWYSNRWVFGGGTKLTVL

SEQ ID NO: 741 - protein, 7 aa, Artificial Sequence
  Synthetic peptide
NARMGVS

SEQ ID NO: 742 - protein, 16 aa, Artificial Sequence
  Synthetic peptide
HIFSNDEKSYSTSLKS

SEQ ID NO: 743 - protein, 14 aa, Artificial Sequence
  Synthetic peptide
MVGYGSGWYAYFDY

SEQ ID NO: 744 - protein, 16 aa, Artificial Sequence
  Synthetic peptide
RSSQSLLHSNGYNYLY

SEQ ID NO: 745 - protein, 7 aa, Artificial Sequence
  Synthetic peptide
EVSNRFS

SEQ ID NO: 746 - protein, 9 aa, Artificial Sequence
  Synthetic peptide
MQALQTPLT

SEQ ID NO: 747 - protein, 124 aa, Artificial Sequence
  Synthetic peptide
QVTLKESGPALVKPTQTLTLTCTFSGFSLSNARMGVSWIRQPPGKALEWLAHIFSNDEKSYSTSLKSRLTISKDTSKRQVVLTMTNMDPVDTATYYCARMVGYGSGWYAYFDYWGQGTLVTVSS

SEQ ID NO: 748 - protein, 112 aa, Artificial Sequence
  Synthetic peptide
DIVMTQTPLSLSVTPGQPASISCRSSQSLLHSNGYNYLYWYLQKPGQPPQLLIYEVSNRFSGVPDRFSGSGSGTDFTLKISRVEAEDVGVYYCMQALQTPLTFGGGTKVEIK

SEQ ID NO: 749 - protein, 251 aa, Artificial Sequence
  Synthetic peptide
QVTLKESGPALVKPTQTLTLTCTFSGFSLSNARMGVSWIRQPPGKALEWLAHIFSNDEKSYSTSLKSRLTISKDTSKRQVVLTMTNMDPVDTATYYCARMVGYGSGWYAYFDYWGQGTLVTVSSGGGGSGGGGSGGGGSDIVMTQTPLSLSVTPGQPASISCRSSQSLLHSNGYNYLYWYLQKPGQPPQLLIYEVSNRFSGVPDRFSGSGSGTDFTLKISRVEAEDVGVYYCMQALQTPLTFGGGTKVEIK

SEQ ID NO: 750 - protein, 506 aa, Artificial Sequence
  Synthetic peptide
QVTLKESGPALVKPTQTLTLTCTFSGFSLSNARMGVSWIRQPPGKALEWLAHIFSNDEKSYSTSLKSRLTISKDTSKRQVVLTMTNMDPVDTATYYCARMVGYGSGWYAYFDYWGQGTLVTVSSGGGGSGGGGSGGGGSDIVMTQTPLSLSVTPGQPASISCRSSQSLLHSNGYNYLYWYLQKPGQPPQLLIYEVSNRFSGVPDRFSGSGSGTDFTLKISRVEAEDVGVYYCMQALQTPLTFGGGTKVEIKSGGGGSEVQLVESGGGLVQPGGSLKLSCAASGFTFNKYAMNWVRQAPGKGLEWVARIRSKYNNYATYYADSVKDRFTISRDDSKNTAYLQMNNLKTEDTAVYYCVRHGNFGNSYISYWAYWGQGTLVTVSSGGGGSGGGGSGGGGSQTVVTQEPSLTVSPGGTVTLTCGSSTGAVTSGNYPNWVQQKPGQAPRGLIGGTKFLAPGTPARFSGSLLGGKAALTLSGVQPEDEAEYYCVLWYSNRWVFGGGTKLTVL

SEQ ID NO: 751 - protein, 5 aa, Artificial Sequence
  Synthetic peptide
SYGMH

SEQ ID NO: 752 - protein, 17 aa, Artificial Sequence
  Synthetic peptide
VISYDGSNEFYADSVKG

SEQ ID NO: 753 - protein, 20 aa, Artificial Sequence
  Synthetic peptide
GGEITMVRGVIGYYYYGMDV

SEQ ID NO: 754 - protein, 11 aa, Artificial Sequence
  Synthetic peptide
RASQSISSYLN

SEQ ID NO: 755 - protein, 7 aa, Artificial Sequence
  Synthetic peptide
AASSLQS

SEQ ID NO: 756 - protein, 9 aa, Artificial Sequence
  Synthetic peptide
LQHNSYPLT

SEQ ID NO: 757 - protein, 129 aa, Artificial Sequence
  Synthetic peptide
QVQLVESGGGVVQPGRSLRLSCAASGFTFSSYGMHWVRQAPGKGLEWVAVISYDGSNEFYADSVKGRFTISRDNSKNTLYLQMNSLRAEDTAVYYCARGGEITMVRGVIGYYYYGMDVWGQGTTVTVSS

SEQ ID NO: 758 - protein, 107 aa, Artificial Sequence
  Synthetic peptide
DIQMTQSPSSLSASVGDRVTITCRASQSISSYLNWYQQKPGKAPKLLIYAASSLQSGVPSRFSGSGSGTEFTLTISSLQPEDFATYYCLQHNSYPLTFGGGTKVEIK

SEQ ID NO: 759 - protein, 251 aa, Artificial Sequence
  Synthetic peptide
QVQLVESGGGVVQPGRSLRLSCAASGFTFSSYGMHWVRQAPGKGLEWVAVISYDGSNEFYADSVKGRFTISRDNSKNTLYLQMNSLRAEDTAVYYCARGGEITMVRGVIGYYYYGMDVWGQGTTVTVSSGGGGSGGGGSGGGGSDIQMTQSPSSLSASVGDRVTITCRASQSISSYLNWYQQKPGKAPKLLIYAASSLQSGVPSRFSGSGSGTEFTLTISSLQPEDFATYYCLQHNSYPLTFGGGTKVEIK

SEQ ID NO: 760 - protein, 506 aa, Artificial Sequence
  Synthetic peptide
QVQLVESGGGVVQPGRSLRLSCAASGFTFSSYGMHWVRQAPGKGLEWVAVISYDGSNEFYADSVKGRFTISRDNSKNTLYLQMNSLRAEDTAVYYCARGGEITMVRGVIGYYYYGMDVWGQGTTVTVSSGGGGSGGGGSGGGGSDIQMTQSPSSLSASVGDRVTITCRASQSISSYLNWYQQKPGKAPKLLIYAASSLQSGVPSRFSGSGSGTEFTLTISSLQPEDFATYYCLQHNSYPLTFGGGTKVEIKSGGGGSEVQLVESGGGLVQPGGSLKLSCAASGFTFNKYAMNWVRQAPGKGLEWVARIRSKYNNYATYYADSVKDRFTISRDDSKNTAYLQMNNLKTEDTAVYYCVRHGNFGNSYISYWAYWGQGTLVTVSSGGGGSGGGGSGGGGSQTVVTQEPSLTVSPGGTVTLTCGSSTGAVTSGNYPNWVQQKPGQAPRGLIGGTKFLAPGTPARFSGSLLGGKAALTLSGVQPEDEAEYYCVLWYSNRWVFGGGTKLTVL

SEQ ID NO: 761 - protein, 5 aa, Artificial Sequence
  Synthetic peptide
SYGMH

SEQ ID NO: 762 - protein, 17 aa, Artificial Sequence
  Synthetic peptide
VISYDGSNEFYADSVKG

SEQ ID NO: 763 - protein, 20 aa, Artificial Sequence
  Synthetic peptide
GGEITMVRGVIGYYYYGMDV

SEQ ID NO: 764 - protein, 11 aa, Artificial Sequence
  Synthetic peptide
RASQGVRNNLV

SEQ ID NO: 765 - protein, 7 aa, Artificial Sequence
  Synthetic peptide
GASTRAT

SEQ ID NO: 766 - protein, 9 aa, Artificial Sequence
  Synthetic peptide
LQHNSYPLT

SEQ ID NO: 767 - protein, 129 aa, Artificial Sequence; identical to SEQ ID NO: 757
  Synthetic peptide

SEQ ID NO: 768 - protein, 107 aa, Artificial Sequence
  Synthetic peptide
EIVMTQSPATLSVSPGERATLSCRASQGVRNNLVWYQQKPGQAPRLLIYGASTRATGIPARFSGSGSGTEFTLTISSLQSEDFATYYCLQHNSYPLTFGGGTKVEIK

SEQ ID NO: 769 - protein, 251 aa, Artificial Sequence
  Synthetic peptide
QVQLVESGGGVVQPGRSLRLSCAASGFTFSSYGMHWVRQAPGKGLEWVAVISYDGSNEFYADSVKGRFTISRDNSKNTLYLQMNSLRAEDTAVYYCARGGEITMVRGVIGYYYYGMDVWGQGTTVTVSSGGGGSGGGGSGGGGSEIVMTQSPATLSVSPGERATLSCRASQGVRNNLVWYQQKPGQAPRLLIYGASTRATGIPARFSGSGSGTEFTLTISSLQSEDFATYYCLQHNSYPLTFGGGTKVEIK

SEQ ID NO: 770 - protein, 506 aa, Artificial Sequence
  Synthetic peptide
QVQLVESGGGVVQPGRSLRLSCAASGFTFSSYGMHWVRQAPGKGLEWVAVISYDGSNEFYADSVKGRFTISRDNSKNTLYLQMNSLRAEDTAVYYCARGGEITMVRGVIGYYYYGMDVWGQGTTVTVSSGGGGSGGGGSGGGGSEIVMTQSPATLSVSPGERATLSCRASQGVRNNLVWYQQKPGQAPRLLIYGASTRATGIPARFSGSGSGTEFTLTISSLQSEDFATYYCLQHNSYPLTFGGGTKVEIKSGGGGSEVQLVESGGGLVQPGGSLKLSCAASGFTFNKYAMNWVRQAPGKGLEWVARIRSKYNNYATYYADSVKDRFTISRDDSKNTAYLQMNNLKTEDTAVYYCVRHGNFGNSYISYWAYWGQGTLVTVSSGGGGSGGGGSGGGGSQTVVTQEPSLTVSPGGTVTLTCGSSTGAVTSGNYPNWVQQKPGQAPRGLIGGTKFLAPGTPARFSGSLLGGKAALTLSGVQPEDEAEYYCVLWYSNRWVFGGGTKLTVL

SEQ ID NO: 771 - protein, 5 aa, Artificial Sequence
  Synthetic peptide
SYGMH

SEQ ID NO: 772 - protein, 17 aa, Artificial Sequence
  Synthetic peptide
VISYDGSNEFYADSVKG

SEQ ID NO: 773 - protein, 20 aa, Artificial Sequence
  Synthetic peptide
GGEITMVRGVIGYYYYGMDV

SEQ ID NO: 774 - protein, 11 aa, Artificial Sequence
  Synthetic peptide
RTSQSISSYLN

SEQ ID NO: 775 - protein, 7 aa, Artificial Sequence
  Synthetic peptide
AASSLQS

SEQ ID NO: 776 - protein, 9 aa, Artificial Sequence
  Synthetic peptide
LQHNSYPLT

SEQ ID NO: 777 - protein, 129 aa, Artificial Sequence; identical to SEQ ID NO: 757
  Synthetic peptide

SEQ ID NO: 778 - protein, 107 aa, Artificial Sequence
  Synthetic peptide
DIQMTQSPSSLSASVGDRVTITCRTSQSISSYLNWYQQKPGKAPKLLIYAASSLQSGVPSRFSGSGSGTEFTLTISSLQPEDFATYYCLQHNSYPLTFGGGTKVDIK

SEQ ID NO: 779 - protein, 251 aa, Artificial Sequence
  Synthetic peptide
QVQLVESGGGVVQPGRSLRLSCAASGFTFSSYGMHWVRQAPGKGLEWVAVISYDGSNEFYADSVKGRFTISRDNSKNTLYLQMNSLRAEDTAVYYCARGGEITMVRGVIGYYYYGMDVWGQGTTVTVSSGGGGSGGGGSGGGGSDIQMTQSPSSLSASVGDRVTITCRTSQSISSYLNWYQQKPGKAPKLLIYAASSLQSGVPSRFSGSGSGTEFTLTISSLQPEDFATYYCLQHNSYPLTFGGGTKVDIK

SEQ ID NO: 780 - protein, 506 aa, Artificial Sequence
  Synthetic peptide
QVQLVESGGGVVQPGRSLRLSCAASGFTFSSYGMHWVRQAPGKGLEWVAVISYDGSNEFYADSVKGRFTISRDNSKNTLYLQMNSLRAEDTAVYYCARGGEITMVRGVIGYYYYGMDVWGQGTTVTVSSGGGGSGGGGSGGGGSDIQMTQSPSSLSASVGDRVTITCRTSQSISSYLNWYQQKPGKAPKLLIYAASSLQSGVPSRFSGSGSGTEFTLTISSLQPEDFATYYCLQHNSYPLTFGGGTKVDIKSGGGGSEVQLVESGGGLVQPGGSLKLSCAASGFTFNKYAMNWVRQAPGKGLEWVARIRSKYNNYATYYADSVKDRFTISRDDSKNTAYLQMNNLKTEDTAVYYCVRHGNFGNSYISYWAYWGQGTLVTVSSGGGGSGGGGSGGGGSQTVVTQEPSLTVSPGGTVTLTCGSSTGAVTSGNYPNWVQQKPGQAPRGLIGGTKFLAPGTPARFSGSLLGGKAALTLSGVQPEDEAEYYCVLWYSNRWVFGGGTKLTVL

SEQ ID NO: 781 - protein, 5 aa, Artificial Sequence
  Synthetic peptide
SYGMH

SEQ ID NO: 782 - protein, 17 aa, Artificial Sequence
  Synthetic peptide
VISYDGSNEFYADSVKG

SEQ ID NO: 783 - protein, 20 aa, Artificial Sequence
  Synthetic peptide
GGEITMVRGVIGYYYYGMDV

SEQ ID NO: 784 - protein, 11 aa, Artificial Sequence
  Synthetic peptide
RASQSISSYLN

SEQ ID NO: 785 - protein, 7 aa, Artificial Sequence
  Synthetic peptide
AASSLQS

SEQ ID NO: 786 - protein, 9 aa, Artificial Sequence
  Synthetic peptide
LQHNSYPLT

SEQ ID NO: 787 - protein, 129 aa, Artificial Sequence; identical to SEQ ID NO: 757
  Synthetic peptide

SEQ ID NO: 788 - protein, 107 aa, Artificial Sequence
  Synthetic peptide
DIQMTQSPSSLSASVGNRVTITCRASQSISSYLNWYQQKPGKAPKLLIYAASSLQSGVPSRFSGSGSGTEFTLTISSLQPEDFATYYCLQHNSYPLTFGGGTKVDIK

SEQ ID NO: 789 - protein, 251 aa, Artificial Sequence
  Synthetic peptide
QVQLVESGGGVVQPGRSLRLSCAASGFTFSSYGMHWVRQAPGKGLEWVAVISYDGSNEFYADSVKGRFTISRDNSKNTLYLQMNSLRAEDTAVYYCARGGEITMVRGVIGYYYYGMDVWGQGTTVTVSSGGGGSGGGGSGGGGSDIQMTQSPSSLSASVGNRVTITCRASQSISSYLNWYQQKPGKAPKLLIYAASSLQSGVPSRFSGSGSGTEFTLTISSLQPEDFATYYCLQHNSYPLTFGGGTKVDIK

SEQ ID NO: 790 - protein, 506 aa, Artificial Sequence
  Synthetic peptide
QVQLVESGGGVVQPGRSLRLSCAASGFTFSSYGMHWVRQAPGKGLEWVAVISYDGSNEFYADSVKGRFTISRDNSKNTLYLQMNSLRAEDTAVYYCARGGEITMVRGVIGYYYYGMDVWGQGTTVTVSSGGGGSGGGGSGGGGSDIQMTQSPSSLSASVGNRVTITCRASQSISSYLNWYQQKPGKAPKLLIYAASSLQSGVPSRFSGSGSGTEFTLTISSLQPEDFATYYCLQHNSYPLTFGGGTKVDIKSGGGGSEVQLVESGGGLVQPGGSLKLSCAASGFTFNKYAMNWVRQAPGKGLEWVARIRSKYNNYATYYADSVKDRFTISRDDSKNTAYLQMNNLKTEDTAVYYCVRHGNFGNSYISYWAYWGQGTLVTVSSGGGGSGGGGSGGGGSQTVVTQEPSLTVSPGGTVTLTCGSSTGAVTSGNYPNWVQQKPGQAPRGLIGGTKFLAPGTPARFSGSLLGGKAALTLSGVQPEDEAEYYCVLWYSNRWVFGGGTKLTVL

SEQ ID NO: 791 - protein, 5 aa, Artificial Sequence
  Synthetic peptide
SYGMH

SEQ ID NO: 792 - protein, 17 aa, Artificial Sequence
  Synthetic peptide
VISYDGSNKYYADSVKG

SEQ ID NO: 793 - protein, 6 aa, Artificial Sequence
  Synthetic peptide
SYGMDV

SEQ ID NO: 794 - protein, 11 aa, Artificial Sequence
  Synthetic peptide
RASQGISSWLA

SEQ ID NO: 795 - protein, 7 aa, Artificial Sequence
  Synthetic peptide
AASSLQS

SEQ ID NO: 796 - protein, 9 aa, Artificial Sequence
  Synthetic peptide
QQANSFPWT

SEQ ID NO: 797 - protein, 115 aa, Artificial Sequence
  Synthetic peptide
QVQLVESGGGVVQPGRSLRLSCAASGFTFSSYGMHWVRQAPGKGLEWVAVISYDGSNKYYADSVKGRFTISRDNSKNTLYLQMNSLRAEDTAVYYCARSYGMDVWGQGTTVTVSS

SEQ ID NO: 798 - protein, 107 aa, Artificial Sequence
  Synthetic peptide
DIQMTQSPSSVSASVGDRVTITCRASQGISSWLAWYQQKPGKAPKLLIYAASSLQSGVPSRFSGSGSGTDFTLTISSLQPEDFATYYCQQANSFPWTFGQGTKLEIK

SEQ ID NO: 799 - protein, 237 aa, Artificial Sequence
  Synthetic peptide
QVQLVESGGGVVQPGRSLRLSCAASGFTFSSYGMHWVRQAPGKGLEWVAVISYDGSNKYYADSVKGRFTISRDNSKNTLYLQMNSLRAEDTAVYYCARSYGMDVWGQGTTVTVSSGGGGSGGGGSGGGGSDIQMTQSPSSVSASVGDRVTITCRASQGISSWLAWYQQKPGKAPKLLIYAASSLQSGVPSRFSGSGSGTDFTLTISSLQPEDFATYYCQQANSFPWTFGQGTKLEIK

SEQ ID NO: 800 - protein, 492 aa, Artificial Sequence
  Synthetic peptide
QVQLVESGGGVVQPGRSLRLSCAASGFTFSSYGMHWVRQAPGKGLEWVAVISYDGSNKYYADSVKGRFTISRDNSKNTLYLQMNSLRAEDTAVYYCARSYGMDVWGQGTTVTVSSGGGGSGGGGSGGGGSDIQMTQSPSSVSASVGDRVTITCRASQGISSWLAWYQQKPGKAPKLLIYAASSLQSGVPSRFSGSGSGTDFTLTISSLQPEDFATYYCQQANSFPWTFGQGTKLEIKSGGGGSEVQLVESGGGLVQPGGSLKLSCAASGFTFNKYAMNWVRQAPGKGLEWVARIRSKYNNYATYYADSVKDRFTISRDDSKNTAYLQMNNLKTEDTAVYYCVRHGNFGNSYISYWAYWGQGTLVTVSSGGGGSGGGGSGGGGSQTVVTQEPSLTVSPGGTVTLTCGSSTGAVTSGNYPNWVQQKPGQAPRGLIGGTKFLAPGTPARFSGSLLGGKAALTLSGVQPEDEAEYYCVLWYSNRWVFGGGTKLTVL

SEQ ID NO: 801 - protein, 993 aa, Homo sapiens
MPALARDGGQLPLLVVFSAMIFGTITNQDLPVIKCVLINHKNNDSSVGKSSSYPMVSESPEDLGCALRPQSSGTVYEAAAVEVDVSASITLQVLVDAPGNISCLWVFKHSSLNCQPHFDLQNRGVVSMVILKMTETQAGEYLLFIQSEATNYTILFTVSIRNTLLYTLRRPYFRKMENQDALVCISESVPEPIVEWVLCDSQGESCKEESPAVVKKEEKVLHELFGTDIRCCARNELGRECTRLFTIDLNQTPQTTLPQLFLKVGEPLWIRCKAVHVNHGFGLTWELENKALEEGNYFEMSTYSTNRTMIRILFAFVSSVARNDTGYYTCSSSKHPSQSALVTIVEKGFINATNSSEDYEIDQYEEFCFSVRFKAYPQIRCTWTFSRKSFPCEQKGLDNGYSISKFCNHKHQPGEYIFHAENDDAQFTKMFTLNIRRKPQVLAEASASQASCFSDGYPLPSWTWKKCSDKSPNCTEEITEGVWNRKANRKVFGQWVSSSTLNMSEAIKGFLVKCCAYNSLGTSCETILLNSPGPFPFIQDNISFYATIGVCLLFIVVLTLLICHKYKKQFRYESQLQMVQVTGSSDNEYFYVDFREYEYDLKWEFPRENLEFGKVLGSGAFGKVMNATAYGISKTGVSIQVAVKMLKEKADSSEREALMSELKMMTQLGSHENIVNLLGACTLSGPIYLIFEYCCYGDLLNYLRSKREKFHRTWTEIFKEHNFSFYPTFQSHPNSSMPGSREVQIHPDSDQISGLHGNSFHSEDEIEYENQKRLEEEEDLNVLTFEDLLCFAYQVAKGMEFLEFKSCVHRDLAARNVLVTHGKVVKICDFGLARDIMSDSNYVVRGNARLPVKWMAPESLFEGIYTIKSDVWSYGILLWEIFSLGVNPYPGIPVDANFYKLIQNGFKMDQPFYATEEIYIIMQSCWAFDSRKRPSFPNLTSFLGCQLADAEEAMYQNVDGRVSECPHTYQNRRPFSREMDLGLLSPQAQVEDS

SEQ ID NO: 802 - protein, 993 aa, Macaca fascicularis
MPALARGGGRLPLLVVFSAMIFGTITNQDLPVIKCVLINHKNNDSSVGKSSSYPMVSESPEDLGCALRPQSAGTVYEAATVEVDVSASITLQVLVDTPGNISCLWVFKHSSLNCQPHFDVQNRGVVSMVILKMTETQAGEYLLFIQSEATNYTILFTVSIRNTLLFTLRRPYFRKMENQDALVCISESVPEPIVEWVLCDSQGESCKEESPAVVKKEEKVLHELFGTDIRCCARNELGRECTRLFTIDLNQTPQTTLPQLFLKVGEPLWIRCKAVHVNHGFGLTWELENKALEEGSYFEMSTYSTNRTMIRILFAFVSSVARNDTGYYTCSSSKHPSQSALVTIVEKGFINATNSSEDYEIDQYEEFCFSVRFKAYPQIRCTWTFSRKSFPCEQKGLDDGYSVSKFCNHKHQPGEYIFHAENGDAQFTKMFTLNIRRKPQVLAEASASQASCSSDGYPLPSWTWKKCSDKSPNCTEDIPEGVWNRKANRKVFGQWVSSSTLNMSEAMKGFLVKCCAYNSLGTSCETILLNSPGPFPFIQDSISFYATIGVCLLFIVVLTMLICHKYKKQFRYESQLQMVQVTGSSDNEYFYVDFRDCDYDLKWEFPRENLEFGKVLGSGAFGKVMNATAYGISKTGVSIQVAVKMLKEKADSSEREALMSELKMMTQLGSHENIVNLLGACTLSGPIYLIFEYCCYGDLLNYLRSKREKFHRTWTEIFKEHNFSFYPTFQSHPNSSMPGSRDVQIHPHSDPISGLHGNSFHSEDEIEYENQKRLEEEEDLNVLTFEDLLCFAYQVAKGMEFLEFKSCVHRDLAARNVLVTHGKVVKICDFGLARDIMSDSNYVVRGNARLPVKWMAPESLFEGIYTIKSDVWSYGILLWEIFSLGVNPYPGIPVDANFYKLIRNGFKMDQPFYATEEIYIIMQSCWAFDSRKRPSFPHLTSFLGCQLEDAEEAMYQNVDGRVSERPHIYQNRRPFSREMDSGPLSPKAQVEDS

SEQ ID NO: 803 - protein, 993 aa, Homo sapiens [sequence omitted]

SEQ ID NO: 804 - protein, 1013 aa, Homo sapiens
MPALARDGGQLPLLVVFSAMIFGTITNQDLPVIKCVLINHKNNDSSVGKSSSYPMVSESPEDLGCALRPQSSGTVYEAAAVEVDVSASITLQVLVDAPGNISCLWVFKHSSLNCQPHFDLQNRGVVSMVILKMTETQAGEYLLFIQSEATNYTILFTVSIRNTLLYTLRRPYFRKMENQDALVCISESVPEPIVEWVLCDSQGESCKEESPAVVKKEEKVLHELFGTDIRCCARNELGRECTRLFTIDLNQTPQTTLPQLFLKVGEPLWIRCKAVHVNHGFGLTWELENKALEEGNYFEMSTYSTNRTMIRILFAFVSSVARNDTGYYTCSSSKHPSQSALVTIVEKGFINATNSSEDYEIDQYEEFCFSVRFKAYPQIRCTWTFSRKSFPCEQKGLDNGYSISKFCNHKHQPGEYIFHAENDDAQFTKMFTLNIRRKPQVLAEASASQASCFSDGYPLPSWTWKKCSDKSPNCTEEITEGVWNRKANRKVFGQWVSSSTLNMSEAIKGFLVKCCAYNSLGTSCETILLNSPGPFPFIQDNISFYATIGVCLLFIVVLTLLICHKYKKQFRYESQLQMVQVTGSSDNEYFYVDFREYEYSSSDNEYFYVDFREYEYDLKDLKWEFPRENLEFGKVLGSGAFGKVMNATAYGISKTGVSIQVAVKMLKEKADSSEREALMSELKMMTQLGSHENIVNLLGACTLSGPIYLIFEYCCYGDLLNYLRSKREKFHRTWTEIFKEHNFSFYPTFQSHPNSSMPGSREVQIHPDSDQISGLHGNSFHSEDEIEYENQKRLEEEEDLNVLTFEDLLCFAYQVAKGMEFLEFKSCVHRDLAARNVLVTHGKVVKICDFGLARDIMSDSNYVVRGNARLPVKWMAPESLFEGIYTIKSDVWSYGILLWEIFSLGVNPYPGIPVDANFYKLIQNGFKMDQPFYATEEIYIIMQSCWAFDSRKRPSFPNLTSFLGCQLADAEEAMYQNVDGRVSECPHTYQNRRPFSREMDLGLLSPQAQVEDS

SEQ ID NO: 805 - protein, 976 aa, Homo sapiens [sequence omitted]

SEQ ID NO: 806 - protein, 972 aa, Homo sapiens
MGPGVLLLLLVATAWHGQGIPVIEPSVPELVVKPGATVTLRCVGNGSVEWDGPPSPHWTLYSDGSSSILSTNNATFQNTGTYRCTEPGDPLGGSAAIHLYVKDPARPWNVLAQEVVVFEDQDALLPCLLTDPVLEAGVSLVRVRGRPLMRHTNYSFSPWHGFTIHRAKFIQSQDYQCSALMGGRKVMSISIRLKVQKVIPGPPALTLVPAELVRIRGEAAQIVCSASSVDVNFDVFLQHNNTKLAIPQQSDFHNNRYQKVLTLNLDQVDFQHAGNYSCVASNVQGKHSTSMFFRVVESAYLNLSSEQNLIQEVTVGEGLNLKVMVEAYPGLQGFNWTYLGPFSDHQPEPKLANATTKDTYRHTFTLSLPRLKPSEAGRYSFLARNPGGWRALTFELTLRYPPEVSVIWTFINGSGTLLCAASGYPQPNVTWLQCSGHTDRCDEAQVLQVWDDPYPEVLSQEPFHKVTVQSLLTVETLEHNQTYECRAHNSVGSGSWAFIPISAGAHTHPPDEFLFTPVVVACMSIMALLLLLLLLLLYKYKQKPKYQVRWKIIESYEGNSYTFIDPTQLPYNEKWEFPRNNLQFGKTLGAGAFGKVVEATAFGLGKEDAVLKVAVKMLKSTAHADEKEALMSELKIMSHLGQHENIVNLLGACTHGGPVLVITEYCCYGDLLNFLRRKAEAMLGPSLSPGQDPEGGVDYKNIHLEKKYVRRDSGFSSQGVDTYVEMRPVSTSSNDSFSEQDLDKEDGRPLELRDLLHFSSQVAQGMAFLASKNCIHRDVAARNVLLTNGHVAKIGDFGLARDIMNDSNYIVKGNARLPVKWMAPESIFDCVYTVQSDVWSYGILLWEIFSLGLNPYPGILVNSKFYKLVKDGYQMAQPAFAPKNIYSIMQACWALEPTHRPTFQQICSFLQEQAQEDRRERDYTNLPSSSRSGGSGSSSSELEEESSSEHLTCCEQGDIAQPLLQPNNYQFC

SEQ ID NO: 807 - protein, 1089 aa, Homo sapiens
MGTSHPAFLVLGCLLTGLSLILCQLSLPSILPNENEKVVQLNSSFSLRCFGESEVSWQYPMSEEESSDVEIRNEENNSGLFVTVLEVSSASAAHTGLYTCYYNHTQTEENELEGRHIYIYVPDPDVAFVPLGMTDYLVIVEDDDSAIIPCRTTDPETPVTLHNSEGVVPASYDSRQGFNGTFTVGPYICEATVKGKKFQTIPFNVYALKATSELDLEMEALKTVYKSGETIVVTCAVFNNEVVDLQWTYPGEVKGKGITMLEEIKVPSIKLVYTLTVPEATVKDSGDYECAARQATREVKEMKKVTISVHEKGFIEIKPTFSQLEAVNLHEVKHFVVEVRAYPPPRISWLKNNLTLIENLTEITTDVEKIQEIRYRSKLKLIRAKEEDSGHYTIVAQNEDAVKSYTFELLTQVPSSILDLVDDHHGSTGGQTVRCTAEGTPLPDIEWMICKDIKKCNNETSWTILANNVSNIITEIHSRDRSTVEGRVTFAKVEETIAVRCLAKNLLGAENRELKLVAPTLRSELTVAAAVLVLLVIVIISLIVLVVIWKQKPRYEIRWRVIESISPDGHEYIYVDPMQLPYDSRWEFPRDGLVLGRVLGSGAFGKVVEGTAYGLSRSQPVMKVAVKMLKPTARSSEKQALMSELKIMTHLGPHLNIVNLLGACTKSGPIYIITEYCFYGDLVNYLHKNRDSFLSHHPEKPKKELDIFGLNPADESTRSYVILSFENNGDYMDMKQADTTQYVPMLERKEVSKYSDIQRSLYDRPASYKKKSMLDSEVKNLLSDDNSEGLTLLDLLSFTYQVARGMEFLASKNCVHRDLAARNVLLAQGKIVKICDFGLARDIMHDSNYVSKGSTFLPVKWMAPESIFDNLYTTLSDVWSYGILLWEIFSLGGTPYPGMMVDSTFYNKIKSGYRMAKPDHATSEVYEIMVKCWNSEPEKRPSFYHLSEIVENLLPGQYKKSYEKIHLDFLKSDHPAVARMRVDSDNAYIGVTYKNEEDKLKDWEGGLDEQRLSADSGYIIPLPDIDPVPEEEDLGKRNRHSSQTSEESAIETGSSSSTFIKREDETIEDIDMMDDIGIDSSDLVEDSFL

SEQ ID NO: 808 - protein, 355 aa, Homo sapiens
MGVCGYLFLPWKCLVVVSLRLLFLVPTGVPVRSGDATFPKAMDNVTVRQGESATLRCTIDNRVTRVAWLNRSTILYAGNDKWCLDPRVVLLSNTQTQYSIEIQNVDVYDEGPYTCSVQTDNHPKTSRVHLIVQVSPKIVEISSDISINEGNNISLTCIATGRPEPTVTWRHISPKAVGFVSEDEYLEIQGITREQSGDYECSASNDVAAPVVRRVKVTVNYPPYISEAKGTGVPVGQKGTLQCEASAVPSAEFQWYKDDKRLIEGKKGVKVENRPFLSKLIFFNVSEHDYGNYTCVASNKLGHTNASIMLFEVKTTALTPWKGPGAVSEVSNGTSRRAGCVWLLPLLVLHLLLKF

SEQ ID NO: 809 - protein, 468 aa, Artificial Sequence
  Synthetic peptide
MGWSCIILFLVATATGVHSGKPIPNPLLGLDSTSGTLRRPYFRKMENQDALVCISESVPEPIVEWVLCDSQGESCKEESPAVVKKEEKVLHELFGTDIRCCARNELGRECTRLFTIDLNQTPQTTLPQLFLKVGEPLWIRCKAVHVNHGFGLTWELENKALEEGNYFEMSTYSTNRTMIRILFAFVSSVARNDTGYYTCSSSKHPSQSALVTIVEKGFINATNSSEDYEIDQYEEFCFSVRFKAYPQIRCTWTFSRKSFPCEQKGLDNGYSISKFCNHKHQPGEYIFHAENDDAQFTKMFTLNIRRKPQVLAEASASQASCFSDGYPLPSWTWKKCSDKSPNCTEEITEGVWNRKANRKVFGQWVSSSTLNMSEAIKGFLVKCCAYNSLGTSCETILLNSPGPFPFIQDNISSGGGGSGAGVIAVIVVVVIAIVAGIVVLVISRKKRMAKYEKAEIKEMGEMHRELNA

SEQ ID NO: 810 - protein, 390 aa, Artificial Sequence
  Synthetic peptide
MGWSCIILFLVATATGVHSGKPIPNPLLGLDSTSGFTIDLNQTPQTTLPQLFLKVGEPLWIRCKAVHVNHGFGLTWELENKALEEGNYFEMSTYSTNRTMIRILFAFVSSVARNDTGYYTCSSSKHPSQSALVTIVEKGFINATNSSEDYEIDQYEEFCFSVRFKAYPQIRCTWTFSRKSFPCEQKGLDNGYSISKFCNHKHQPGEYIFHAENDDAQFTKMFTLNIRRKPQVLAEASASQASCFSDGYPLPSWTWKKCSDKSPNCTEEITEGVWNRKANRKVFGQWVSSSTLNMSEAIKGFLVKCCAYNSLGTSCETILLNSPGPFPFIQDNISSGGGGSGAGVIAVIVVVVIAIVAGIVVLVISRKKRMAKYEKAEIKEMGEMHRELNA

SEQ ID NO: 811 - protein, 287 aa, Artificial Sequence
  Synthetic peptide
MGWSCIILFLVATATGVHSGKPIPNPLLGLDSTSGGFINATNSSEDYEIDQYEEFCFSVRFKAYPQIRCTWTFSRKSFPCEQKGLDNGYSISKFCNHKHQPGEYIFHAENDDAQFTKMFTLNIRRKPQVLAEASASQASCFSDGYPLPSWTWKKCSDKSPNCTEEITEGVWNRKANRKVFGQWVSSSTLNMSEAIKGFLVKCCAYNSLGTSCETILLNSPGPFPFIQDNISSGGGGSGAGVIAVIVVVVIAIVAGIVVLVISRKKRMAKYEKAEIKEMGEMHRELNA

SEQ ID NO: 812 - protein, 200 aa, Artificial Sequence
  Synthetic peptide
MGWSCIILFLVATATGVHSGKPIPNPLLGLDSTSGIRRKPQVLAEASASQASCFSDGYPLPSWTWKKCSDKSPNCTEEITEGVWNRKANRKVFGQWVSSSTLNMSEAIKGFLVKCCAYNSLGTSCETILLNSPGPFPFIQDNISSGGGGSGAGVIAVIVVVVIAIVAGIVVLVISRKKRMAKYEKAEIKEMGEMHRELNA

SEQ ID NO: 813 - protein, 543 aa, Homo sapiens
MPALARDGGQLPLLVVFSAMIFGTITNQDLPVIKCVLINHKNNDSSVGKSSSYPMVSESPEDLGCALRPQSSGTVYEAAAVEVDVSASITLQVLVDAPGNISCLWVFKHSSLNCQPHFDLQNRGVVSMVILKMTETQAGEYLLFIQSEATNYTILFTVSIRNTLLYTLRRPYFRKMENQDALVCISESVPEPIVEWVLCDSQGESCKEESPAVVKKEEKVLHELFGTDIRCCARNELGRECTRLFTIDLNQTPQTTLPQLFLKVGEPLWIRCKAVHVNHGFGLTWELENKALEEGNYFEMSTYSTNRTMIRILFAFVSSVARNDTGYYTCSSSKHPSQSALVTIVEKGFINATNSSEDYEIDQYEEFCFSVRFKAYPQIRCTWTFSRKSFPCEQKGLDNGYSISKFCNHKHQPGEYIFHAENDDAQFTKMFTLNIRRKPQVLAEASASQASCFSDGYPLPSWTWKKCSDKSPNCTEEITEGVWNRKANRKVFGQWVSSSTLNMSEAIKGFLVKCCAYNSLGTSCETILLNSPGPFPFIQDNIS

SEQ ID NO: 814 - protein, 83 aa, Homo sapiens
AAVEVDVSASITLQVLVDAPGNISCLWVFKHSSLNCQPHFDLQNRGVVSMVILKMTETQAGEYLLFIQSEATNYTILFTVSIR

SEQ ID NO: 815 - protein, 78 aa, Homo sapiens
TLRRPYFRKMENQDALVCISESVPEPIVEWVLCDSQGESCKEESPAVVKKEEKVLHELFGTDIRCCARNELGRECTRL

SEQ ID NO: 816 - protein, 101 aa, Homo sapiens
FTIDLNQTPQTTLPQLFLKVGEPLWIRCKAVHVNHGFGLTWELENKALEEGNYFEMSTYSTNRTMIRILFAFVSSVARNDTGYYTCSSSKHPSQSALVTIV

SEQ ID NO: 817 - protein, 87 aa, Homo sapiens
GFINATNSSEDYEIDQYEEFCFSVRFKAYPQIRCTWTFSRKSFPCEQKGLDNGYSISKFCNHKHQPGEYIFHAENDDAQFTKMFTLN

SEQ ID NO: 818 - protein, 99 aa, Homo sapiens
IRRKPQVLAEASASQASCFSDGYPLPSWTWKKCSDKSPNCTEEITEGVWNRKANRKVFGQWVSSSTLNMSEAIKGFLVKCCAYNSLGTSCETILLNSPG

SEQ ID NO: 819 - protein, 52 aa, Artificial Sequence
  Synthetic peptide
NQDLPVIKCVLINHKNNDSSVGKSSSYPMVSESPEDLGCALRPQSSGTVYEA

SEQ ID NO: 820 - protein, 89 aa, Artificial Sequence
  Synthetic peptide
AAVEVDVSASITLQVLVDAPGNISCLWVFKHSSLNCQPHFDLQNRGVVSMVILKMTETQAGEYLLFIQSEATNYTILFTVSIRNTLLYT

SEQ ID NO: 821 - protein, 77 aa, Artificial Sequence
  Synthetic peptide
LRRPYFRKMENQDALVCISESVPEPIVEWVLCDSQGESCKEESPAVVKKEEKVLHELFGTDIRCCARNELGRECTRL

SEQ ID NO: 822 - protein, 39 aa, Artificial Sequence
  Synthetic peptide
LRRPYFRKMENQDALVCISESVPEPIVEWVLCDSQGESC

SEQ ID NO: 823 - protein, 38 aa, Artificial Sequence
  Synthetic peptide
KEESPAVVKKEEKVLHELFGTDIRCCARNELGRECTRL

SEQ ID NO: 824 - protein, 101 aa, Artificial Sequence; identical to SEQ ID NO: 816
  Synthetic peptide

SEQ ID NO: 825 - protein, 89 aa, Artificial Sequence
  Synthetic peptide
EKGFINATNSSEDYEIDQYEEFCFSVRFKAYPQIRCTWTFSRKSFPCEQKGLDNGYSISKFCNHKHQPGEYIFHAENDDAQFTKMFTLN

SEQ ID NO: 826 - protein, 109 aa, Artificial Sequence
  Synthetic peptide
IRRKPQVLAEASASQASCFSDGYPLPSWTWKKCSDKSPNCTEEITEGVWNRKANRKVFGQWVSSSTLNMSEAIKGFLVKCCAYNSLGTSCETILLNSPGPFPFIQDNIS

SEQ ID NO: 827 - protein, 589 aa, Artificial Sequence
  Synthetic peptide
GKPIPNPLLGLDSTSGNQDLPVIKCVLISHENNGSSAGKPSSYRMVRGSPEDLQCAPRRQSEGTVYEAAAVEVDVSASITLQVLVDAPGNISCLWVFKHSSLNCQPHFDLQNRGVVSMVILKMTETQAGEYLLFIQSEATNYTILFTVSIRNTLLYTLRRPYFRKMENQDALVCISESVPEPIVEWVLCDSQGESCKEESPAVVKKEEKVLHELFGTDIRCCARNELGRECTRLFTIDLNQTPQTTLPQLFLKVGEPLWIRCKAVHVNHGFGLTWELENKALEEGNYFEMSTYSTNRTMIRILFAFVSSVARNDTGYYTCSSSKHPSQSALVTIVEKGFINATNSSEDYEIDQYEEFCFSVRFKAYPQIRCTWTFSRKSFPCEQKGLDNGYSISKFCNHKHQPGEYIFHAENDDAQFTKMFTLNIRRKPQVLAEASASQASCFSDGYPLPSWTWKKCSDKSPNCTEEITEGVWNRKANRKVFGQWVSSSTLNMSEAIKGFLVKCCAYNSLGTSCETILLNSPGPFPFIQDNISSGGGGSGAGVIAVIVVVVIAIVAGIVVLVISRKKRMAKYEKAEIKEMGEMHRELNA

SEQ ID NO: 828 - protein, 589 aa, Artificial Sequence
  Synthetic peptide
GKPIPNPLLGLDSTSGNQDLPVIKCVLINHKNNDSSVGKSSSYPMVSESPEDLGCALRPQSSGTVYEAATVEVAESGSITLQVQLATPGDLSCLWVFKHSSLGCQPHFDLQNRGIVSMAILNVTETQAGEYLLHIQSEAANYTVLFTVNVRDTQLYVLRRPYFRKMENQDALVCISESVPEPIVEWVLCDSQGESCKEESPAVVKKEEKVLHELFGTDIRCCARNELGRECTRLFTIDLNQTPQTTLPQLFLKVGEPLWIRCKAVHVNHGFGLTWELENKALEEGNYFEMSTYSTNRTMIRILFAFVSSVARNDTGYYTCSSSKHPSQSALVTIVEKGFINATNSSEDYEIDQYEEFCFSVRFKAYPQIRCTWTFSRKSFPCEQKGLDNGYSISKFCNHKHQPGEYIFHAENDDAQFTKMFTLNIRRKPQVLAEASASQASCFSDGYPLPSWTWKKCSDKSPNCTEEITEGVWNRKANRKVFGQWVSSSTLNMSEAIKGFLVKCCAYNSLGTSCETILLNSPGPFPFIQDNISSGGGGSGAGVIAVIVVVVIAIVAGIVVLVISRKKRMAKYEKAEIKEMGEMHRELNA

SEQ ID NO: 829 - protein, 608 aa, artificial
  hu lsp V5xFlt3-E3muxEpC-pEFDHFR
MGWSCIILFLVATATGVHSGKPIPNPLLGLDSTSGNQDLPVIKCVLINHKNNDSSVGKSSSYPMVSESPEDLGCALRPQSSGTVYEAAAVEVDVSASITLQVLVDAPGNISCLWVFKHSSLNCQPHFDLQNRGVVSMVILKMTETQAGEYLLFIQSEATNYTILFTVSIRNTLLYTLRRPYFRKMENQDALLCISEGVPEPTVEWVLCSSHRESCKEEGPAVVRKEEKVLHELFGTDIRCCARNALGRECTKLFTIDLNQTPQTTLPQLFLKVGEPLWIRCKAVHVNHGFGLTWELENKALEEGNYFEMSTYSTNRTMIRILFAFVSSVARNDTGYYTCSSSKHPSQSALVTIVEKGFINATNSSEDYEIDQYEEFCFSVRFKAYPQIRCTWTFSRKSFPCEQKGLDNGYSISKFCNHKHQPGEYIFHAENDDAQFTKMFTLNIRRKPQVLAEASASQASCFSDGYPLPSWTWKKCSDKSPNCTEEITEGVWNRKANRKVFGQWVSSSTLNMSEAIKGFLVKCCAYNSLGTSCETILLNSPGPFPFIQDNISSGGGGSGAGVIAVIVVVVIAIVAGIVVLVISRKKRMAKYEKAEIKEMGEMHRELNA

SEQ ID NO: 830 - protein, 589 aa, artificial
  hu lsp V5xFlt3-E3AmuxEpC-pEFDHFR
GKPIPNPLLGLDSTSGNQDLPVIKCVLINHKNNDSSVGKSSSYPMVSESPEDLGCALRPQSSGTVYEAAAVEVDVSASITLQVLVDAPGNISCLWVFKHSSLNCQPHFDLQNRGVVSMVILKMTETQAGEYLLFIQSEATNYTILFTVSIRNTLLYTLRRPYFRKMENQDALLCISEGVPEPTVEWVLCSSHRESCKEESPAVVKKEEKVLHELFGTDIRCCARNELGRECTRLFTIDLNQTPQTTLPQLFLKVGEPLWIRCKAVHVNHGFGLTWELENKALEEGNYFEMSTYSTNRTMIRILFAFVSSVARNDTGYYTCSSSKHPSQSALVTIVEKGFINATNSSEDYEIDQYEEFCFSVRFKAYPQIRCTWTFSRKSFPCEQKGLDNGYSISKFCNHKHQPGEYIFHAENDDAQFTKMFTLNIRRKPQVLAEASASQASCFSDGYPLPSWTWKKCSDKSPNCTEEITEGVWNRKANRKVFGQWVSSSTLNMSEAIKGFLVKCCAYNSLGTSCETILLNSPGPFPFIQDNISSGGGGSGAGVIAVIVVVVIAIVAGIVVLVISRKKRMAKYEKAEIKEMGEMHRELNA

SEQ ID NO: 831 - protein, 589 aa, artificial
  hu lsp V5xFlt3-E3BmuxEpC-pEFDHFR
GKPIPNPLLGLDSTSGNQDLPVIKCVLINHKNNDSSVGKSSSYPMVSESPEDLGCALRPQSSGTVYEAAAVEVDVSASITLQVLVDAPGNISCLWVFKHSSLNCQPHFDLQNRGVVSMVILKMTETQAGEYLLFIQSEATNYTILFTVSIRNTLLYTLRRPYFRKMENQDALVCISESVPEPIVEWVLCDSQGESCKEEGPAVVRKEEKVLHELFGTDIRCCARNALGRECTKLFTIDLNQTPQTTLPQLFLKVGEPLWIRCKAVHVNHGFGLTWELENKALEEGNYFEMSTYSTNRTMIRILFAFVSSVARNDTGYYTCSSSKHPSQSALVTIVEKGFINATNSSEDYEIDQYEEFCFSVRFKAYPQIRCTWTFSRKSFPCEQKGLDNGYSISKFCNHKHQPGEYIFHAENDDAQFTKMFTLNIRRKPQVLAEASASQASCFSDGYPLPSWTWKKCSDKSPNCTEEITEGVWNRKANRKVFGQWVSSSTLNMSEAIKGFLVKCCAYNSLGTSCETILLNSPGPFPFIQDNISSGGGGSGAGVIAVIVVVVIAIVAGIVVLVISRKKRMAKYEKAEIKEMGEMHRELNA

SEQ ID NO: 832 - protein, 589 aa, artificial
  hu lsp V5xFlt3-E4muxEpC-pEFDHFR
GKPIPNPLLGLDSTSGNQDLPVIKCVLINHKNNDSSVGKSSSYPMVSESPEDLGCALRPQSSGTVYEAAAVEVDVSASITLQVLVDAPGNISCLWVFKHSSLNCQPHFDLQNRGVVSMVILKMTETQAGEYLLFIQSEATNYTILFTVSIRNTLLYTLRRPYFRKMENQDALVCISESVPEPIVEWVLCDSQGESCKEESPAVVKKEEKVLHELFGTDIRCCARNELGRECTRLFTIDLNQAPQSTLPQLFLKVGEPLWIRCKAIHVNHGFGLTWELEDKALEEGSYFEMSTYSTNRTMIRILLAFVSSVGRNDTGYYTCSSSKHPSQSALVTILEKGFINATNSSEDYEIDQYEEFCFSVRFKAYPQIRCTWTFSRKSFPCEQKGLDNGYSISKFCNHKHQPGEYIFHAENDDAQFTKMFTLNIRRKPQVLAEASASQASCFSDGYPLPSWTWKKCSDKSPNCTEEITEGVWNRKANRKVFGQWVSSSTLNMSEAIKGFLVKCCAYNSLGTSCETILLNSPGPFPFIQDNISSGGGGSGAGVIAVIVVVVIAIVAGIVVLVISRKKRMAKYEKAEIKEMGEMHRELNA

SEQ ID NO: 833 - protein, 589 aa, artificial
  hu lsp V5xFlt3-E5muxEpC-pEFDHFR
GKPIPNPLLGLDSTSGNQDLPVIKCVLINHKNNDSSVGKSSSYPMVSESPEDLGCALRPQSSGTVYEAAAVEVDVSASITLQVLVDAPGNISCLWVFKHSSLNCQPHFDLQNRGVVSMVILKMTETQAGEYLLFIQSEATNYTILFTVSIRNTLLYTLRRPYFRKMENQDALVCISESVPEPIVEWVLCDSQGESCKEESPAVVKKEEKVLHELFGTDIRCCARNELGRECTRLFTIDLNQTPQTTLPQLFLKVGEPLWIRCKAVHVNHGFGLTWELENKALEEGNYFEMSTYSTNRTMIRILFAFVSSVARNDTGYYTCSSSKHPSQSALVTIVEKGFINATSSQEEYEIDPYEKFCFSVRFKAYPRIRCTWIFSQASFPCEQRGLEDGYSISKFCDHKNKPGEYIFYAENDDAQFTKMFTLNIRRKPQVLAEASASQASCFSDGYPLPSWTWKKCSDKSPNCTEEITEGVWNRKANRKVFGQWVSSSTLNMSEAIKGFLVKCCAYNSLGTSCETILLNSPGPFPFIQDNISSGGGGSGAGVIAVIVVVVIAIVAGIVVLVISRKKRMAKYEKAEIKEMGEMHRELNA

SEQ ID NO: 834 - protein, 589 aa, artificial
  hu lsp V5xFlt3-E6muxEpC-pEFDHFR
GKPIPNPLLGLDSTSGNQDLPVIKCVLINHKNNDSSVGKSSSYPMVSESPEDLGCALRPQSSGTVYEAAAVEVDVSASITLQVLVDAPGNISCLWVFKHSSLNCQPHFDLQNRGVVSMVILKMTETQAGEYLLFIQSEATNYTILFTVSIRNTLLYTLRRPYFRKMENQDALVCISESVPEPIVEWVLCDSQGESCKEESPAVVKKEEKVLHELFGTDIRCCARNELGRECTRLFTIDLNQTPQTTLPQLFLKVGEPLWIRCKAVHVNHGFGLTWELENKALEEGNYFEMSTYSTNRTMIRILFAFVSSVARNDTGYYTCSSSKHPSQSALVTIVEKGFINATNSSEDYEIDQYEEFCFSVRFKAYPQIRCTWTFSRKSFPCEQKGLDNGYSISKFCNHKHQPGEYIFHAENDDAQFTKMFTLNIRKKPQVLANASASQASCSSDGYPLPSWTWKKCSDKSPNCTEEIPEGVWNKKANRKVFGQWVSSSTLNMSEAGKGLLVKCCAYNSMGTSCETIFLNSPGPFPFIQDNISSGGGGSGAGVIAVIVVVVIAIVAGIVVLVISRKKRMAKYEKAEIKEMGEMHRELNA

SEQ ID NO: 835 - protein, 227 aa, artificial
  Fc monomer-1
DKTHTCPPCPAPELLGGPSVFLFPPKPKDTLMISRTPEVTCVVVDVSHEDPEVKFNWYVDGVEVHNAKTKPCEEQYGSTYRCVSVLTVLHQDWLNGKEYKCKVSNKALPAPIEKTISKAKGQPREPQVYTLPPSREEMTKNQVSLTCLVKGFYPSDIAVEWESNGQPENNYKTTPPVLDSDGSFFLYSKLTVDKSRWQQGNVFSCSVMHEALHNHYTQKSLSLSPGK

SEQ ID NO: 836 - protein, 225 aa, artificial
  Fc monomer-2
DKTHTCPPCPAPELLGGPSVFLFPPKPKDTLMISRTPEVTCVVVDVSHEDPEVKFNWYVDGVEVHNAKTKPCEEQYGSTYRCVSVLTVLHQDWLNGKEYKCKVSNKALPAPIEKTISKAKGQPREPQVYTLPPSREEMTKNQVSLTCLVKGFYPSDIAVEWESNGQPENNYKTTPPVLDSDGSFFLYSKLTVDKSRWQQGNVFSCSVMHEALHNHYTQKSLSLSP

SEQ ID NO: 837 - protein, 227 aa, artificial
  Fc monomer-3
DKTHTCPPCPAPELLGGPSVFLFPPKPKDTLMISRTPEVTCVVVDVSHEDPEVKFNWYVDGVEVHNAKTKPREEQYNSTYRVVSVLTVLHQDWLNGKEYKCKVSNKALPAPIEKTISKAKGQPREPQVYTLPPSREEMTKNQVSLTCLVKGFYPSDIAVEWESNGQPENNYKTTPPVLDSDGSFFLYSKLTVDKSRWQQGNVFSCSVMHEALHNHYTQKSLSLSPGK

SEQ ID NO: 838 - protein, 225 aa, artificial
  Fc monomer-4
DKTHTCPPCPAPELLGGPSVFLFPPKPKDTLMISRTPEVTCVVVDVSHEDPEVKFNWYVDGVEVHNAKTKPREEQYNSTYRVVSVLTVLHQDWLNGKEYKCKVSNKALPAPIEKTISKAKGQPREPQVYTLPPSREEMTKNQVSLTCLVKGFYPSDIAVEWESNGQPENNYKTTPPVLDSDGSFFLYSKLTVDKSRWQQGNVFSCSVMHEALHNHYTQKSLSLSP

SEQ ID NO: 839 - protein, 227 aa, artificial
  Fc monomer-5
DKTHTCPPCPAPELLGGPSVFLFPPKPKDTLMISRTPEVTCVVVDVSHEDPEVKFNWYVDGVEVHNAKTKPREEQYGSTYRVVSVLTVLHQDWLNGKEYKCKVSNKALPAPIEKTISKAKGQPREPQVYTLPPSREEMTKNQVSLTCLVKGFYPSDIAVEWESNGQPENNYKTTPPVLDSDGSFFLYSKLTVDKSRWQQGNVFSCSVMHEALHNHYTQKSLSLSPGK

SEQ ID NO: 840 - protein, 225 aa, artificial
  Fc monomer-6
DKTHTCPPCPAPELLGGPSVFLFPPKPKDTLMISRTPEVTCVVVDVSHEDPEVKFNWYVDGVEVHNAKTKPREEQYGSTYRVVSVLTVLHQDWLNGKEYKCKVSNKALPAPIEKTISKAKGQPREPQVYTLPPSREEMTKNQVSLTCLVKGFYPSDIAVEWESNGQPENNYKTTPPVLDSDGSFFLYSKLTVDKSRWQQGNVFSCSVMHEALHNHYTQKSLSLSP

SEQ ID NO: 841 - protein, 227 aa, artificial
  Fc monomer-7
DKTHTCPPCPAPELLGGPSVFLFPPKPKDTLMISRTPEVTCVVVDVSHEDPEVKFNWYVDGVEVHNAKTKPCEEQYNSTYRCVSVLTVLHQDWLNGKEYKCKVSNKALPAPIEKTISKAKGQPREPQVYTLPPSREEMTKNQVSLTCLVKGFYPSDIAVEWESNGQPENNYKTTPPVLDSDGSFFLYSKLTVDKSRWQQGNVFSCSVMHEALHNHYTQKSLSLSPGK

SEQ ID NO: 842 - protein, 225 aa, artificial
  Fc monomer-8
DKTHTCPPCPAPELLGGPSVFLFPPKPKDTLMISRTPEVTCVVVDVSHEDPEVKFNWYVDGVEVHNAKTKPCEEQYNSTYRCVSVLTVLHQDWLNGKEYKCKVSNKALPAPIEKTISKAKGQPREPQVYTLPPSREEMTKNQVSLTCLVKGFYPSDIAVEWESNGQPENNYKTTPPVLDSDGSFFLYSKLTVDKSRWQQGNVFSCSVMHEALHNHYTQKSLSLSP

SEQ ID NO: 843 - protein, 484 aa, artificial
  scFc-1
DKTHTCPPCPAPELLGGPSVFLFPPKPKDTLMISRTPEVTCVVVDVSHEDPEVKFNWYVDGVEVHNAKTKPCEEQYGSTYRCVSVLTVLHQDWLNGKEYKCKVSNKALPAPIEKTISKAKGQPREPQVYTLPPSREEMTKNQVSLTCLVKGFYPSDIAVEWESNGQPENNYKTTPPVLDSDGSFFLYSKLTVDKSRWQQGNVFSCSVMHEALHNHYTQKSLSLSPGKGGGGSGGGGSGGGGSGGGGSGGGGSGGGGSDKTHTCPPCPAPELLGGPSVFLFPPKPKDTLMISRTPEVTCVVVDVSHEDPEVKFNWYVDGVEVHNAKTKPCEEQYGSTYRCVSVLTVLHQDWLNGKEYKCKVSNKALPAPIEKTISKAKGQPREPQVYTLPPSREEMTKNQVSLTCLVKGFYPSDIAVEWESNGQPENNYKTTPPVLDSDGSFFLYSKLTVDKSRWQQGNVFSCSVMHEALHNHYTQKSLSLSPGK

SEQ ID NO: 844 - protein, 480 aa, artificial
  scFc-2
DKTHTCPPCPAPELLGGPSVFLFPPKPKDTLMISRTPEVTCVVVDVSHEDPEVKFNWYVDGVEVHNAKTKPCEEQYGSTYRCVSVLTVLHQDWLNGKEYKCKVSNKALPAPIEKTISKAKGQPREPQVYTLPPSREEMTKNQVSLTCLVKGFYPSDIAVEWESNGQPENNYKTTPPVLDSDGSFFLYSKLTVDKSRWQQGNVFSCSVMHEALHNHYTQKSLSLSPGGGGSGGGGSGGGGSGGGGSGGGGSGGGGSDKTHTCPPCPAPELLGGPSVFLFPPKPKDTLMISRTPEVTCVVVDVSHEDPEVKFNWYVDGVEVHNAKTKPCEEQYGSTYRCVSVLTVLHQDWLNGKEYKCKVSNKALPAPIEKTISKAKGQPREPQVYTLPPSREEMTKNQVSLTCLVKGFYPSDIAVEWESNGQPENNYKTTPPVLDSDGSFFLYSKLTVDKSRWQQGNVFSCSVMHEALHNHYTQKSLSLSP

SEQ ID NO: 845 - protein, 484 aa, artificial
  scFc-3
DKTHTCPPCPAPELLGGPSVFLFPPKPKDTLMISRTPEVTCVVVDVSHEDPEVKFNWYVDGVEVHNAKTKPREEQYNSTYRVVSVLTVLHQDWLNGKEYKCKVSNKALPAPIEKTISKAKGQPREPQVYTLPPSREEMTKNQVSLTCLVKGFYPSDIAVEWESNGQPENNYKTTPPVLDSDGSFFLYSKLTVDKSRWQQGNVFSCSVMHEALHNHYTQKSLSLSPGKGGGGSGGGGSGGGGSGGGGSGGGGSGGGGSDKTHTCPPCPAPELLGGPSVFLFPPKPKDTLMISRTPEVTCVVVDVSHEDPEVKFNWYVDGVEVHNAKTKPREEQYNSTYRVVSVLTVLHQDWLNGKEYKCKVSNKALPAPIEKTISKAKGQPREPQVYTLPPSREEMTKNQVSLTCLVKGFYPSDIAVEWESNGQPENNYKTTPPVLDSDGSFFLYSKLTVDKSRWQQGNVFSCSVMHEALHNHYTQKSLSLSPGK

SEQ ID NO: 846 - protein, 480 aa, artificial
  scFc-4
DKTHTCPPCPAPELLGGPSVFLFPPKPKDTLMISRTPEVTCVVVDVSHEDPEVKFNWYVDGVEVHNAKTKPREEQYNSTYRVVSVLTVLHQDWLNGKEYKCKVSNKALPAPIEKTISKAKGQPREPQVYTLPPSREEMTKNQVSLTCLVKGFYPSDIAVEWESNGQPENNYKTTPPVLDSDGSFFLYSKLTVDKSRWQQGNVFSCSVMHEALHNHYTQKSLSLSPGGGGSGGGGSGGGGSGGGGSGGGGSGGGGSDKTHTCPPCPAPELLGGPSVFLFPPKPKDTLMISRTPEVTCVVVDVSHEDPEVKFNWYVDGVEVHNAKTKPREEQYNSTYRVVSVLTVLHQDWLNGKEYKCKVSNKALPAPIEKTISKAKGQPREPQVYTLPPSREEMTKNQVSLTCLVKGFYPSDIAVEWESNGQPENNYKTTPPVLDSDGSFFLYSKLTVDKSRWQQGNVFSCSVMHEALHNHYTQKSLSLSP

SEQ ID NO: 847 - protein, 484 aa, artificial
  scFc-5
DKTHTCPPCPAPELLGGPSVFLFPPKPKDTLMISRTPEVTCVVVDVSHEDPEVKFNWYVDGVEVHNAKTKPREEQYGSTYRVVSVLTVLHQDWLNGKEYKCKVSNKALPAPIEKTISKAKGQPREPQVYTLPPSREEMTKNQVSLTCLVKGFYPSDIAVEWESNGQPENNYKTTPPVLDSDGSFFLYSKLTVDKSRWQQGNVFSCSVMHEALHNHYTQKSLSLSPGKGGGGSGGGGSGGGGSGGGGSGGGGSGGGGSDKTHTCPPCPAPELLGGPSVFLFPPKPKDTLMISRTPEVTCVVVDVSHEDPEVKFNWYVDGVEVHNAKTKPREEQYGSTYRVVSVLTVLHQDWLNGKEYKCKVSNKALPAPIEKTISKAKGQPREPQVYTLPPSREEMTKNQVSLTCLVKGFYPSDIAVEWESNGQPENNYKTTPPVLDSDGSFFLYSKLTVDKSRWQQGNVFSCSVMHEALHNHYTQKSLSLSPGK

SEQ ID NO: 848 - protein, 480 aa, artificial
  scFc-6
DKTHTCPPCPAPELLGGPSVFLFPPKPKDTLMISRTPEVTCVVVDVSHEDPEVKFNWYVDGVEVHNAKTKPREEQYGSTYRVVSVLTVLHQDWLNGKEYKCKVSNKALPAPIEKTISKAKGQPREPQVYTLPPSREEMTKNQVSLTCLVKGFYPSDIAVEWESNGQPENNYKTTPPVLDSDGSFFLYSKLTVDKSRWQQGNVFSCSVMHEALHNHYTQKSLSLSPGGGGSGGGGSGGGGSGGGGSGGGGSGGGGSDKTHTCPPCPAPELLGGPSVFLFPPKPKDTLMISRTPEVTCVVVDVSHEDPEVKFNWYVDGVEVHNAKTKPREEQYGSTYRVVSVLTVLHQDWLNGKEYKCKVSNKALPAPIEKTISKAKGQPREPQVYTLPPSREEMTKNQVSLTCLVKGFYPSDIAVEWESNGQPENNYKTTPPVLDSDGSFFLYSKLTVDKSRWQQGNVFSCSVMHEALHNHYTQKSLSLSP

SEQ ID NO: 849 - protein, 484 aa, artificial
  scFc-7
DKTHTCPPCPAPELLGGPSVFLFPPKPKDTLMISRTPEVTCVVVDVSHEDPEVKFNWYVDGVEVHNAKTKPCEEQYNSTYRCVSVLTVLHQDWLNGKEYKCKVSNKALPAPIEKTISKAKGQPREPQVYTLPPSREEMTKNQVSLTCLVKGFYPSDIAVEWESNGQPENNYKTTPPVLDSDGSFFLYSKLTVDKSRWQQGNVFSCSVMHEALHNHYTQKSLSLSPGKGGGGSGGGGSGGGGSGGGGSGGGGSGGGGSDKTHTCPPCPAPELLGGPSVFLFPPKPKDTLMISRTPEVTCVVVDVSHEDPEVKFNWYVDGVEVHNAKTKPCEEQYNSTYRCVSVLTVLHQDWLNGKEYKCKVSNKALPAPIEKTISKAKGQPREPQVYTLPPSREEMTKNQVSLTCLVKGFYPSDIAVEWESNGQPENNYKTTPPVLDSDGSFFLYSKLTVDKSRWQQGNVFSCSVMHEALHNHYTQKSLSLSPGK

SEQ ID NO: 850 - protein, 480 aa, artificial
  scFc-8
DKTHTCPPCPAPELLGGPSVFLFPPKPKDTLMISRTPEVTCVVVDVSHEDPEVKFNWYVDGVEVHNAKTKPCEEQYNSTYRCVSVLTVLHQDWLNGKEYKCKVSNKALPAPIEKTISKAKGQPREPQVYTLPPSREEMTKNQVSLTCLVKGFYPSDIAVEWESNGQPENNYKTTPPVLDSDGSFFLYSKLTVDKSRWQQGNVFSCSVMHEALHNHYTQKSLSLSPGGGGSGGGGSGGGGSGGGGSGGGGSGGGGSDKTHTCPPCPAPELLGGPSVFLFPPKPKDTLMISRTPEVTCVVVDVSHEDPEVKFNWYVDGVEVHNAKTKPCEEQYNSTYRCVSVLTVLHQDWLNGKEYKCKVSNKALPAPIEKTISKAKGQPREPQVYTLPPSREEMTKNQVSLTCLVKGFYPSDIAVEWESNGQPENNYKTTPPVLDSDGSFFLYSKLTVDKSRWQQGNVFSCSVMHEALHNHYTQKSLSLSP

SEQ ID NO: 851 - protein, 20 aa, artificial
  (G4S)4 linker
GGGGSGGGGSGGGGSGGGGS

SEQ ID NO: 852 - protein, 25 aa, artificial
  (G4S)5 linker
GGGGSGGGGSGGGGSGGGGSGGGGS

SEQ ID NO: 853 - protein, 30 aa, artificial
  (G4S)6 linker
GGGGSGGGGSGGGGSGGGGSGGGGSGGGGS

SEQ ID NO: 854 - protein, 35 aa, artificial
  (G4S)7 linker
GGGGSGGGGSGGGGSGGGGSGGGGSGGGGSGGGGS

SEQ ID NO: 855 - protein, 40 aa, artificial
  (G4S)8 linker
GGGGSGGGGSGGGGSGGGGSGGGGSGGGGSGGGGSGGGGS

SEQ ID NO: 856 - protein, 989 aa, artificial
  FL_16xCD3-scFc
QVTLKESGPVLVKPTETLTLTCTVSGFSLRNARMAVSWIRQPPGKTLEWLAHIFSNDEKSYSTSLKSRLTISKDTSKSQVVLTMTNMDPVDTATYYCARIVGYGSGWYGYFDYWGQGTLVTVSSGGGGSGGGGSGGGGSDIQMTQSPSSVSASVGDRVTITCRASQDIRYDLAWYQQKPGKAPKRLIYAASSLQSGVPSRFSGSGSGTEFTLTISSLQPEDFATYYCLQHNFYPLTFGGGTKVEIKSGGGGSEVQLVESGGGLVQPGGSLKLSCAASGFTFNKYAMNWVRQAPGKGLEWVARIRSKYNNYATYYADSVKDRFTISRDDSKNTAYLQMNNLKTEDTAVYYCVRHGNFGNSYISYWAYWGQGTLVTVSSGGGGSGGGGSGGGGSQTVVTQEPSLTVSPGGTVTLTCGSSTGAVTSGNYPNWVQQKPGQAPRGLIGGTKFLAPGTPARFSGSLLGGKAALTLSGVQPEDEAEYYCVLWYSNRWVFGGGTKLTVLGGGGDKTHTCPPCPAPELLGGPSVFLFPPKPKDTLMISRTPEVTCVVVDVSHEDPEVKFNWYVDGVEVHNAKTKPCEEQYGSTYRCVSVLTVLHQDWLNGKEYKCKVSNKALPAPIEKTISKAKGQPREPQVYTLPPSREEMTKNQVSLTCLVKGFYPSDIAVEWESNGQPENNYKTTPPVLDSDGSFFLYSKLTVDKSRWQQGNVFSCSVMHEALHNHYTQKSLSLSPGKGGGGSGGGGSGGGGSGGGGSGGGGSGGGGSDKTHTCPPCPAPELLGGPSVFLFPPKPKDTLMISRTPEVTCVVVDVSHEDPEVKFNWYVDGVEVHNAKTKPCEEQYGSTYRCVSVLTVLHQDWLNGKEYKCKVSNKALPAPIEKTISKAKGQPREPQVYTLPPSREEMTKNQVSLTCLVKGFYPSDIAVEWESNGQPENNYKTTPPVLDSDGSFFLYSKLTVDKSRWQQGNVFSCSVMHEALHNHYTQKSLSLSPGK

SEQ ID NO: 857 - protein, 987 aa, artificial
  FL_16xCD3-scFc_delGK
QVTLKESGPVLVKPTETLTLTCTVSGFSLRNARMAVSWIRQPPGKTLEWLAHIFSNDEKSYSTSLKSRLTISKDTSKSQVVLTMTNMDPVDTATYYCARIVGYGSGWYGYFDYWGQGTLVTVSSGGGGSGGGGSGGGGSDIQMTQSPSSVSASVGDRVTITCRASQDIRYDLAWYQQKPGKAPKRLIYAASSLQSGVPSRFSGSGSGTEFTLTISSLQPEDFATYYCLQHNFYPLTFGGGTKVEIKSGGGGSEVQLVESGGGLVQPGGSLKLSCAASGFTFNKYAMNWVRQAPGKGLEWVARIRSKYNNYATYYADSVKDRFTISRDDSKNTAYLQMNNLKTEDTAVYYCVRHGNFGNSYISYWAYWGQGTLVTVSSGGGGSGGGGSGGGGSQTVVTQEPSLTVSPGGTVTLTCGSSTGAVTSGNYPNWVQQKPGQAPRGLIGGTKFLAPGTPARFSGSLLGGKAALTLSGVQPEDEAEYYCVLWYSNRWVFGGGTKLTVLGGGGDKTHTCPPCPAPELLGGPSVFLFPPKPKDTLMISRTPEVTCVVVDVSHEDPEVKFNWYVDGVEVHNAKTKPCEEQYGSTYRCVSVLTVLHQDWLNGKEYKCKVSNKALPAPIEKTISKAKGQPREPQVYTLPPSREEMTKNQVSLTCLVKGFYPSDIAVEWESNGQPENNYKTTPPVLDSDGSFFLYSKLTVDKSRWQQGNVFSCSVMHEALHNHYTQKSLSLSPGGGGSGGGGSGGGGSGGGGSGGGGSGGGGSDKTHTCPPCPAPELLGGPSVFLFPPKPKDTLMISRTPEVTCVVVDVSHEDPEVKFNWYVDGVEVHNAKTKPCEEQYGSTYRCVSVLTVLHQDWLNGKEYKCKVSNKALPAPIEKTISKAKGQPREPQVYTLPPSREEMTKNQVSLTCLVKGFYPSDIAVEWESNGQPENNYKTTPPVLDSDGSFFLYSKLTVDKSRWQQGNVFSCSVMHEALHNHYTQKSLSLSPGK

SEQ ID NO: 858 - protein, 989 aa, artificial
  FL_23xCD3-scFc
QVTLKESGPALVKPTETLTLTCTVSGFSFRNARMGVSWIRQPPGKALEWLAHIFSNDEKSYSTSLKSRLTISKDTSKSQVVLTLTNMDPVDTATYFCARMPEYSSGWSGAFDIWGQGTMVTVSSGGGGSGGGGSGGGGSDIQMTQSPSSLSASVGDRVTITCRASQDIGYDLGWYQQKPGKAPKRLIYAASTLQSGVPSRFSGSGSGTEFTLIISSLQPEDFATYYCLQHNSFPWTFGQGTKVEIKSGGGGSEVQLVESGGGLVQPGGSLKLSCAASGFTFNKYAMNWVRQAPGKGLEWVARIRSKYNNYATYYADSVKDRFTISRDDSKNTAYLQMNNLKTEDTAVYYCVRHGNFGNSYISYWAYWGQGTLVTVSSGGGGSGGGGSGGGGSQTVVTQEPSLTVSPGGTVTLTCGSSTGAVTSGNYPNWVQQKPGQAPRGLIGGTKFLAPGTPARFSGSLLGGKAALTLSGVQPEDEAEYYCVLWYSNRWVFGGGTKLTVLGGGGDKTHTCPPCPAPELLGGPSVFLFPPKPKDTLMISRTPEVTCVVVDVSHEDPEVKFNWYVDGVEVHNAKTKPCEEQYGSTYRCVSVLTVLHQDWLNGKEYKCKVSNKALPAPIEKTISKAKGQPREPQVYTLPPSREEMTKNQVSLTCLVKGFYPSDIAVEWESNGQPENNYKTTPPVLDSDGSFFLYSKLTVDKSRWQQGNVFSCSVMHEALHNHYTQKSLSLSPGKGGGGSGGGGSGGGGSGGGGSGGGGSGGGGSDKTHTCPPCPAPELLGGPSVFLFPPKPKDTLMISRTPEVTCVVVDVSHEDPEVKFNWYVDGVEVHNAKTKPCEEQYGSTYRCVSVLTVLHQDWLNGKEYKCKVSNKALPAPIEKTISKAKGQPREPQVYTLPPSREEMTKNQVSLTCLVKGFYPSDIAVEWESNGQPENNYKTTPPVLDSDGSFFLYSKLTVDKSRWQQGNVFSCSVMHEALHNHYTQKSLSLSPGK

SEQ ID NO: 859 - protein, 987 aa, artificial
  FL_23xCD3-scFc_delGK
QVTLKESGPALVKPTETLTLTCTVSGFSFRNARMGVSWIRQPPGKALEWLAHIFSNDEKSYSTSLKSRLTISKDTSKSQVVLTLTNMDPVDTATYFCARMPEYSSGWSGAFDIWGQGTMVTVSSGGGGSGGGGSGGGGSDIQMTQSPSSLSASVGDRVTITCRASQDIGYDLGWYQQKPGKAPKRLIYAASTLQSGVPSRFSGSGSGTEFTLIISSLQPEDFATYYCLQHNSFPWTFGQGTKVEIKSGGGGSEVQLVESGGGLVQPGGSLKLSCAASGFTFNKYAMNWVRQAPGKGLEWVARIRSKYNNYATYYADSVKDRFTISRDDSKNTAYLQMNNLKTEDTAVYYCVRHGNFGNSYISYWAYWGQGTLVTVSSGGGGSGGGGSGGGGSQTVVTQEPSLTVSPGGTVTLTCGSSTGAVTSGNYPNWVQQKPGQAPRGLIGGTKFLAPGTPARFSGSLLGGKAALTLSGVQPEDEAEYYCVLWYSNRWVFGGGTKLTVLGGGGDKTHTCPPCPAPELLGGPSVFLFPPKPKDTLMISRTPEVTCVVVDVSHEDPEVKFNWYVDGVEVHNAKTKPCEEQYGSTYRCVSVLTVLHQDWLNGKEYKCKVSNKALPAPIEKTISKAKGQPREPQVYTLPPSREEMTKNQVSLTCLVKGFYPSDIAVEWESNGQPENNYKTTPPVLDSDGSFFLYSKLTVDKSRWQQGNVFSCSVMHEALHNHYTQKSLSLSPGGGGSGGGGSGGGGSGGGGSGGGGSGGGGSDKTHTCPPCPAPELLGGPSVFLFPPKPKDTLMISRTPEVTCVVVDVSHEDPEVKFNWYVDGVEVHNAKTKPCEEQYGSTYRCVSVLTVLHQDWLNGKEYKCKVSNKALPAPIEKTISKAKGQPREPQVYTLPPSREEMTKNQVSLTCLVKGFYPSDIAVEWESNGQPENNYKTTPPVLDSDGSFFLYSKLTVDKSRWQQGNVFSCSVMHEALHNHYTQKSLSLSPGK

SEQ ID NO: 860 - protein, 989 aa, artificial
  FL_36xCD3-scFc
QVTLKESGPTLVKPTETLTLTCTFSGFSLRYARMGVSWIRQPPGKALEWLAHIFSNDEKSYSTSLKSRLTISKDTSKSQVVLTLTNMDPVDTATYFCARMPEYSSGWSGAFDIWGQGTMVTVSSGGGGSGGGGSGGGGSDIQMTQSPSSLSASVGDRVTITCRASQDIRNDLAWYQQKPGKAPKRLIYAASSLQSGVPSRFSGSGSGTEFTLTISSLQPEDFATYYCLQHNSYPLTFGGGTKLEIKSGGGGSEVQLVESGGGLVQPGGSLKLSCAASGFTFNKYAMNWVRQAPGKGLEWVARIRSKYNNYATYYADSVKDRFTISRDDSKNTAYLQMNNLKTEDTAVYYCVRHGNFGNSYISYWAYWGQGTLVTVSSGGGGSGGGGSGGGGSQTVVTQEPSLTVSPGGTVTLTCGSSTGAVTSGNYPNWVQQKPGQAPRGLIGGTKFLAPGTPARFSGSLLGGKAALTLSGVQPEDEAEYYCVLWYSNRWVFGGGTKLTVLGGGGDKTHTCPPCPAPELLGGPSVFLFPPKPKDTLMISRTPEVTCVVVDVSHEDPEVKFNWYVDGVEVHNAKTKPCEEQYGSTYRCVSVLTVLHQDWLNGKEYKCKVSNKALPAPIEKTISKAKGQPREPQVYTLPPSREEMTKNQVSLTCLVKGFYPSDIAVEWESNGQPENNYKTTPPVLDSDGSFFLYSKLTVDKSRWQQGNVFSCSVMHEALHNHYTQKSLSLSPGKGGGGSGGGGSGGGGSGGGGSGGGGSGGGGSDKTHTCPPCPAPELLGGPSVFLFPPKPKDTLMISRTPEVTCVVVDVSHEDPEVKFNWYVDGVEVHNAKTKPCEEQYGSTYRCVSVLTVLHQDWLNGKEYKCKVSNKALPAPIEKTISKAKGQPREPQVYTLPPSREEMTKNQVSLTCLVKGFYPSDIAVEWESNGQPENNYKTTPPVLDSDGSFFLYSKLTVDKSRWQQGNVFSCSVMHEALHNHYTQKSLSLSPGK

SEQ ID NO: 861 - protein, 987 aa, artificial
  FL_36xCD3-scFc_delGK
QVTLKESGPTLVKPTETLTLTCTFSGFSLRYARMGVSWIRQPPGKALEWLAHIFSNDEKSYSTSLKSRLTISKDTSKSQVVLTLTNMDPVDTATYFCARMPEYSSGWSGAFDIWGQGTMVTVSSGGGGSGGGGSGGGGSDIQMTQSPSSLSASVGDRVTITCRASQDIRNDLAWYQQKPGKAPKRLIYAASSLQSGVPSRFSGSGSGTEFTLTISSLQPEDFATYYCLQHNSYPLTFGGGTKLEIKSGGGGSEVQLVESGGGLVQPGGSLKLSCAASGFTFNKYAMNWVRQAPGKGLEWVARIRSKYNNYATYYADSVKDRFTISRDDSKNTAYLQMNNLKTEDTAVYYCVRHGNFGNSYISYWAYWGQGTLVTVSSGGGGSGGGGSGGGGSQTVVTQEPSLTVSPGGTVTLTCGSSTGAVTSGNYPNWVQQKPGQAPRGLIGGTKFLAPGTPARFSGSLLGGKAALTLSGVQPEDEAEYYCVLWYSNRWVFGGGTKLTVLGGGGDKTHTCPPCPAPELLGGPSVFLFPPKPKDTLMISRTPEVTCVVVDVSHEDPEVKFNWYVDGVEVHNAKTKPCEEQYGSTYRCVSVLTVLHQDWLNGKEYKCKVSNKALPAPIEKTISKAKGQPREPQVYTLPPSREEMTKNQVSLTCLVKGFYPSDIAVEWESNGQPENNYKTTPPVLDSDGSFFLYSKLTVDKSRWQQGNVFSCSVMHEALHNHYTQKSLSLSPGGGGSGGGGSGGGGSGGGGSGGGGSGGGGSDKTHTCPPCPAPELLGGPSVFLFPPKPKDTLMISRTPEVTCVVVDVSHEDPEVKFNWYVDGVEVHNAKTKPCEEQYGSTYRCVSVLTVLHQDWLNGKEYKCKVSNKALPAPIEKTISKAKGQPREPQVYTLPPSREEMTKNQVSLTCLVKGFYPSDIAVEWESNGQPENNYKTTPPVLDSDGSFFLYSKLTVDKSRWQQGNVFSCSVMHEALHNHYTQKSLSLSPGK

SEQ ID NO: 862 - protein, 989 aa, artificial
  FL_39_xCD3-scFc
QVTLKESGPTLVKPTETLTLTCTLSGFSLNNARMGVSWIRQPPGKCLEWLAHIFSNDEKSYSTSLKNRLTISKDSSKTQVVLTMTNVDPVDTATYYCARIVGYGSGWYGFFDYWGQGTLVTVSSGGGGSGGGGSGGGGSDIQMTQSPSSLSASVGDRVTITCRASQGIRNDLGWYQQKPGKAPKRLIYAASTLQSGVPSRFSGSGSGTEFTLTISSLQPEDFATYYCLQHNSYPLTFGCGTKVEIKSGGGGSEVQLVESGGGLVQPGGSLKLSCAASGFTFNKYAMNWVRQAPGKGLEWVARIRSKYNNYATYYADSVKDRFTISRDDSKNTAYLQMNNLKTEDTAVYYCVRHGNFGNSYISYWAYWGQGTLVTVSSGGGGSGGGGSGGGGSQTVVTQEPSLTVSPGGTVTLTCGSSTGAVTSGNYPNWVQQKPGQAPRGLIGGTKFLAPGTPARFSGSLLGGKAALTLSGVQPEDEAEYYCVLWYSNRWVFGGGTKLTVLGGGGDKTHTCPPCPAPELLGGPSVFLFPPKPKDTLMISRTPEVTCVVVDVSHEDPEVKFNWYVDGVEVHNAKTKPCEEQYGSTYRCVSVLTVLHQDWLNGKEYKCKVSNKALPAPIEKTISKAKGQPREPQVYTLPPSREEMTKNQVSLTCLVKGFYPSDIAVEWESNGQPENNYKTTPPVLDSDGSFFLYSKLTVDKSRWQQGNVFSCSVMHEALHNHYTQKSLSLSPGKGGGGSGGGGSGGGGSGGGGSGGGGSGGGGSDKTHTCPPCPAPELLGGPSVFLFPPKPKDTLMISRTPEVTCVVVDVSHEDPEVKFNWYVDGVEVHNAKTKPCEEQYGSTYRCVSVLTVLHQDWLNGKEYKCKVSNKALPAPIEKTISKAKGQPREPQVYTLPPSREEMTKNQVSLTCLVKGFYPSDIAVEWESNGQPENNYKTTPPVLDSDGSFFLYSKLTVDKSRWQQGNVFSCSVMHEALHNHYTQKSLSLSPGK

SEQ ID NO: 863 - protein, 987 aa, artificial
  FL_39_xCD3-scFc_delGK
QVTLKESGPTLVKPTETLTLTCTLSGFSLNNARMGVSWIRQPPGKCLEWLAHIFSNDEKSYSTSLKNRLTISKDSSKTQVVLTMTNVDPVDTATYYCARIVGYGSGWYGFFDYWGQGTLVTVSSGGGGSGGGGSGGGGSDIQMTQSPSSLSASVGDRVTITCRASQGIRNDLGWYQQKPGKAPKRLIYAASTLQSGVPSRFSGSGSGTEFTLTISSLQPEDFATYYCLQHNSYPLTFGCGTKVEIKSGGGGSEVQLVESGGGLVQPGGSLKLSCAASGFTFNKYAMNWVRQAPGKGLEWVARIRSKYNNYATYYADSVKDRFTISRDDSKNTAYLQMNNLKTEDTAVYYCVRHGNFGNSYISYWAYWGQGTLVTVSSGGGGSGGGGSGGGGSQTVVTQEPSLTVSPGGTVTLTCGSSTGAVTSGNYPNWVQQKPGQAPRGLIGGTKFLAPGTPARFSGSLLGGKAALTLSGVQPEDEAEYYCVLWYSNRWVFGGGTKLTVLGGGGDKTHTCPPCPAPELLGGPSVFLFPPKPKDTLMISRTPEVTCVVVDVSHEDPEVKFNWYVDGVEVHNAKTKPCEEQYGSTYRCVSVLTVLHQDWLNGKEYKCKVSNKALPAPIEKTISKAKGQPREPQVYTLPPSREEMTKNQVSLTCLVKGFYPSDIAVEWESNGQPENNYKTTPPVLDSDGSFFLYSKLTVDKSRWQQGNVFSCSVMHEALHNHYTQKSLSLSPGGGGSGGGGSGGGGSGGGGSGGGGSGGGGSDKTHTCPPCPAPELLGGPSVFLFPPKPKDTLMISRTPEVTCVVVDVSHEDPEVKFNWYVDGVEVHNAKTKPCEEQYGSTYRCVSVLTVLHQDWLNGKEYKCKVSNKALPAPIEKTISKAKGQPREPQVYTLPPSREEMTKNQVSLTCLVKGFYPSDIAVEWESNGQPENNYKTTPPVLDSDGSFFLYSKLTVDKSRWQQGNVFSCSVMHEALHNHYTQKSLSLSPGK

SEQ ID NO: 864 - protein, 989 aa, artificial
  FL_42_xCD3-scFc
QVTLKESGPALVKPTETLTLTCTLSGFSLNNARMAVSWIRQPPGKCLEWLAHIFSNDEKSYSTSLKSRLTISKDTSKSQVVLTMTNMDPEDTATYYCARIVGYGTGWYGFFDYWGQGILVTVSSGGGGSGGGGSGGGGSDIQMTQSPSSLSASVGDRVTITCRASQGIRNDLAWYQQKPGKAPKRLIYAASSLQSGVPSRFSGSGSGTEFTLTISSLQPEDFATYYCLQHNSYPLTFGCGTKVEIKSGGGGSEVQLVESGGGLVQPGGSLKLSCAASGFTFNKYAMNWVRQAPGKGLEWVARIRSKYNNYATYYADSVKDRFTISRDDSKNTAYLQMNNLKTEDTAVYYCVRHGNFGNSYISYWAYWGQGTLVTVSSGGGGSGGGGSGGGGSQTVVTQEPSLTVSPGGTVTLTCGSSTGAVTSGNYPNWVQQKPGQAPRGLIGGTKFLAPGTPARFSGSLLGGKAALTLSGVQPEDEAEYYCVLWYSNRWVFGGGTKLTVLGGGGDKTHTCPPCPAPELLGGPSVFLFPPKPKDTLMISRTPEVTCVVVDVSHEDPEVKFNWYVDGVEVHNAKTKPCEEQYGSTYRCVSVLTVLHQDWLNGKEYKCKVSNKALPAPIEKTISKAKGQPREPQVYTLPPSREEMTKNQVSLTCLVKGFYPSDIAVEWESNGQPENNYKTTPPVLDSDGSFFLYSKLTVDKSRWQQGNVFSCSVMHEALHNHYTQKSLSLSPGKGGGGSGGGGSGGGGSGGGGSGGGGSGGGGSDKTHTCPPCPAPELLGGPSVFLFPPKPKDTLMISRTPEVTCVVVDVSHEDPEVKFNWYVDGVEVHNAKTKPCEEQYGSTYRCVSVLTVLHQDWLNGKEYKCKVSNKALPAPIEKTISKAKGQPREPQVYTLPPSREEMTKNQVSLTCLVKGFYPSDIAVEWESNGQPENNYKTTPPVLDSDGSFFLYSKLTVDKSRWQQGNVFSCSVMHEALHNHYTQKSLSLSPGK

SEQ ID NO: 865 - protein, 987 aa, artificial
  FL_42_xCD3-scFc_delGK
QVTLKESGPALVKPTETLTLTCTLSGFSLNNARMAVSWIRQPPGKCLEWLAHIFSNDEKSYSTSLKSRLTISKDTSKSQVVLTMTNMDPEDTATYYCARIVGYGTGWYGFFDYWGQGILVTVSSGGGGSGGGGSGGGGSDIQMTQSPSSLSASVGDRVTITCRASQGIRNDLAWYQQKPGKAPKRLIYAASSLQSGVPSRFSGSGSGTEFTLTISSLQPEDFATYYCLQHNSYPLTFGCGTKVEIKSGGGGSEVQLVESGGGLVQPGGSLKLSCAASGFTFNKYAMNWVRQAPGKGLEWVARIRSKYNNYATYYADSVKDRFTISRDDSKNTAYLQMNNLKTEDTAVYYCVRHGNFGNSYISYWAYWGQGTLVTVSSGGGGSGGGGSGGGGSQTVVTQEPSLTVSPGGTVTLTCGSSTGAVTSGNYPNWVQQKPGQAPRGLIGGTKFLAPGTPARFSGSLLGGKAALTLSGVQPEDEAEYYCVLWYSNRWVFGGGTKLTVLGGGGDKTHTCPPCPAPELLGGPSVFLFPPKPKDTLMISRTPEVTCVVVDVSHEDPEVKFNWYVDGVEVHNAKTKPCEEQYGSTYRCVSVLTVLHQDWLNGKEYKCKVSNKALPAPIEKTISKAKGQPREPQVYTLPPSREEMTKNQVSLTCLVKGFYPSDIAVEWESNGQPENNYKTTPPVLDSDGSFFLYSKLTVDKSRWQQGNVFSCSVMHEALHNHYTQKSLSLSPGGGGSGGGGSGGGGSGGGGSGGGGSGGGGSDKTHTCPPCPAPELLGGPSVFLFPPKPKDTLMISRTPEVTCVVVDVSHEDPEVKFNWYVDGVEVHNAKTKPCEEQYGSTYRCVSVLTVLHQDWLNGKEYKCKVSNKALPAPIEKTISKAKGQPREPQVYTLPPSREEMTKNQVSLTCLVKGFYPSDIAVEWESNGQPENNYKTTPPVLDSDGSFFLYSKLTVDKSRWQQGNVFSCSVMHEALHNHYTQKSLSLSPGK

SEQ ID NO: 866 - protein, 989 aa, artificial
  FL_46_CCxCD3-scFc
QVTLKESGPVLVKPTQTLTLTCTFSGFSLSNARMGVSWIRQPPGKCLEWLALIYWNDDKRYSPSLKSRLTITKDTSKNQVVLTMTNMDPVDTATYYCARMVGYGSGWYAYFDYWGQGTLVTVSSGGGGSGGGGSGGGGSDIQMTQSPSSLSASVGDRVTITCRASQGIRNDLGWYQQKPGKAPKRLIYAASSLQSGVPSRFSGSGSGTEFTLTISSLQPEDFATYYCLQHNSYPLTFGCGTKVEIKSGGGGSEVQLVESGGGLVQPGGSLKLSCAASGFTFNKYAMNWVRQAPGKGLEWVARIRSKYNNYATYYADSVKDRFTISRDDSKNTAYLQMNNLKTEDTAVYYCVRHGNFGNSYISYWAYWGQGTLVTVSSGGGGSGGGGSGGGGSQTVVTQEPSLTVSPGGTVTLTCGSSTGAVTSGNYPNWVQQKPGQAPRGLIGGTKFLAPGTPARFSGSLLGGKAALTLSGVQPEDEAEYYCVLWYSNRWVFGGGTKLTVLGGGGDKTHTCPPCPAPELLGGPSVFLFPPKPKDTLMISRTPEVTCVVVDVSHEDPEVKFNWYVDGVEVHNAKTKPCEEQYGSTYRCVSVLTVLHQDWLNGKEYKCKVSNKALPAPIEKTISKAKGQPREPQVYTLPPSREEMTKNQVSLTCLVKGFYPSDIAVEWESNGQPENNYKTTPPVLDSDGSFFLYSKLTVDKSRWQQGNVFSCSVMHEALHNHYTQKSLSLSPGKGGGGSGGGGSGGGGSGGGGSGGGGSGGGGSDKTHTCPPCPAPELLGGPSVFLFPPKPKDTLMISRTPEVTCVVVDVSHEDPEVKFNWYVDGVEVHNAKTKPCEEQYGSTYRCVSVLTVLHQDWLNGKEYKCKVSNKALPAPIEKTISKAKGQPREPQVYTLPPSREEMTKNQVSLTCLVKGFYPSDIAVEWESNGQPENNYKTTPPVLDSDGSFFLYSKLTVDKSRWQQGNVFSCSVMHEALHNHYTQKSLSLSPGK

SEQ ID NO: 867 - protein, 987 aa, artificial
  FL_46_CCxCD3-scFc_delGK
QVTLKESGPVLVKPTQTLTLTCTFSGFSLSNARMGVSWIRQPPGKCLEWLALIYWNDDKRYSPSLKSRLTITKDTSKNQVVLTMTNMDPVDTATYYCARMVGYGSGWYAYFDYWGQGTLVTVSSGGGGSGGGGSGGGGSDIQMTQSPSSLSASVGDRVTITCRASQGIRNDLGWYQQKPGKAPKRLIYAASSLQSGVPSRFSGSGSGTEFTLTISSLQPEDFATYYCLQHNSYPLTFGCGTKVEIKSGGGGSEVQLVESGGGLVQPGGSLKLSCAASGFTFNKYAMNWVRQAPGKGLEWVARIRSKYNNYATYYADSVKDRFTISRDDSKNTAYLQMNNLKTEDTAVYYCVRHGNFGNSYISYWAYWGQGTLVTVSSGGGGSGGGGSGGGGSQTVVTQEPSLTVSPGGTVTLTCGSSTGAVTSGNYPNWVQQKPGQAPRGLIGGTKFLAPGTPARFSGSLLGGKAALTLSGVQPEDEAEYYCVLWYSNRWVFGGGTKLTVLGGGGDKTHTCPPCPAPELLGGPSVFLFPPKPKDTLMISRTPEVTCVVVDVSHEDPEVKFNWYVDGVEVHNAKTKPCEEQYGSTYRCVSVLTVLHQDWLNGKEYKCKVSNKALPAPIEKTISKAKGQPREPQVYTLPPSREEMTKNQVSLTCLVKGFYPSDIAVEWESNGQPENNYKTTPPVLDSDGSFFLYSKLTVDKSRWQQGNVFSCSVMHEALHNHYTQKSLSLSPGGGGSGGGGSGGGGSGGGGSGGGGSGGGGSDKTHTCPPCPAPELLGGPSVFLFPPKPKDTLMISRTPEVTCVVVDVSHEDPEVKFNWYVDGVEVHNAKTKPCEEQYGSTYRCVSVLTVLHQDWLNGKEYKCKVSNKALPAPIEKTISKAKGQPREPQVYTLPPSREEMTKNQVSLTCLVKGFYPSDIAVEWESNGQPENNYKTTPPVLDSDGSFFLYSKLTVDKSRWQQGNVFSCSVMHEALHNHYTQKSLSLSPGK

SEQ ID NO: 868 - protein, 989 aa, artificial
  FL_52_CCxCD3-scFc
QVTLKESGPTLVKPTETLTLTCTFSGFSLRYARMGVSWIRQPPGKCLEWLAHIFSNDEKSYSTSLKSRLTISKDTSKSQVVLTLTNMDPVDTATYFCARMPEYSSGWSGAFDIWGQGTMVTVSSGGGGSGGGGSGGGGSDIQMTQSPSSLSASVGDRVTITCRASQDIRNDLAWYQQKPGKAPKRLIYAASSLQSGVPSRFSGSGSGTEFTLTISSLQPEDFATYYCLQHNSYPLTFGCGTKLEIKSGGGGSEVQLVESGGGLVQPGGSLKLSCAASGFTFNKYAMNWVRQAPGKGLEWVARIRSKYNNYATYYADSVKDRFTISRDDSKNTAYLQMNNLKTEDTAVYYCVRHGNFGNSYISYWAYWGQGTLVTVSSGGGGSGGGGSGGGGSQTVVTQEPSLTVSPGGTVTLTCGSSTGAVTSGNYPNWVQQKPGQAPRGLIGGTKFLAPGTPARFSGSLLGGKAALTLSGVQPEDEAEYYCVLWYSNRWVFGGGTKLTVLGGGGDKTHTCPPCPAPELLGGPSVFLFPPKPKDTLMISRTPEVTCVVVDVSHEDPEVKFNWYVDGVEVHNAKTKPCEEQYGSTYRCVSVLTVLHQDWLNGKEYKCKVSNKALPAPIEKTISKAKGQPREPQVYTLPPSREEMTKNQVSLTCLVKGFYPSDIAVEWESNGQPENNYKTTPPVLDSDGSFFLYSKLTVDKSRWQQGNVFSCSVMHEALHNHYTQKSLSLSPGKGGGGSGGGGSGGGGSGGGGSGGGGSGGGGSDKTHTCPPCPAPELLGGPSVFLFPPKPKDTLMISRTPEVTCVVVDVSHEDPEVKFNWYVDGVEVHNAKTKPCEEQYGSTYRCVSVLTVLHQDWLNGKEYKCKVSNKALPAPIEKTISKAKGQPREPQVYTLPPSREEMTKNQVSLTCLVKGFYPSDIAVEWESNGQPENNYKTTPPVLDSDGSFFLYSKLTVDKSRWQQGNVFSCSVMHEALHNHYTQKSLSLSPGK

SEQ ID NO: 869 - protein, 987 aa, artificial
  FL_52_CCxCD3-scFc_delGK
QVTLKESGPTLVKPTETLTLTCTFSGFSLRYARMGVSWIRQPPGKCLEWLAHIFSNDEKSYSTSLKSRLTISKDTSKSQVVLTLTNMDPVDTATYFCARMPEYSSGWSGAFDIWGQGTMVTVSSGGGGSGGGGSGGGGSDIQMTQSPSSLSASVGDRVTITCRASQDIRNDLAWYQQKPGKAPKRLIYAASSLQSGVPSRFSGSGSGTEFTLTISSLQPEDFATYYCLQHNSYPLTFGCGTKLEIKSGGGGSEVQLVESGGGLVQPGGSLKLSCAASGFTFNKYAMNWVRQAPGKGLEWVARIRSKYNNYATYYADSVKDRFTISRDDSKNTAYLQMNNLKTEDTAVYYCVRHGNFGNSYISYWAYWGQGTLVTVSSGGGGSGGGGSGGGGSQTVVTQEPSLTVSPGGTVTLTCGSSTGAVTSGNYPNWVQQKPGQAPRGLIGGTKFLAPGTPARFSGSLLGGKAALTLSGVQPEDEAEYYCVLWYSNRWVFGGGTKLTVLGGGGDKTHTCPPCPAPELLGGPSVFLFPPKPKDTLMISRTPEVTCVVVDVSHEDPEVKFNWYVDGVEVHNAKTKPCEEQYGSTYRCVSVLTVLHQDWLNGKEYKCKVSNKALPAPIEKTISKAKGQPREPQVYTLPPSREEMTKNQVSLTCLVKGFYPSDIAVEWESNGQPENNYKTTPPVLDSDGSFFLYSKLTVDKSRWQQGNVFSCSVMHEALHNHYTQKSLSLSPGGGGSGGGGSGGGGSGGGGSGGGGSGGGGSDKTHTCPPCPAPELLGGPSVFLFPPKPKDTLMISRTPEVTCVVVDVSHEDPEVKFNWYVDGVEVHNAKTKPCEEQYGSTYRCVSVLTVLHQDWLNGKEYKCKVSNKALPAPIEKTISKAKGQPREPQVYTLPPSREEMTKNQVSLTCLVKGFYPSDIAVEWESNGQPENNYKTTPPVLDSDGSFFLYSKLTVDKSRWQQGNVFSCSVMHEALHNHYTQKSLSLSPGK

SEQ ID NO: 870 - protein, 994 aa, artificial
  FL_61xCD3-scFc
QVQLVESGGGVVQPGRSLRLSCAASGFTFSSYGMHWVRQAPGKGLEWVAVISYEGSNEFYAESVKGRFTISRDNSKNTLYLQMNSLRAEDTAVYYCARGGEITMVRGVIGYYYYGMDVWGQGTTVTVSSGGGGSGGGGSGGGGSDIQMTQSPSSLSASVGDRVTITCRASQSISSYLNWYQQKPGKAPKLLIYAASSLQSGVPSRFSGSGSGTEFTLTISSLQPEDFATYYCLQHNSYPLTFGGGTKVEIKSGGGGSEVQLVESGGGLVQPGGSLKLSCAASGFTFNKYAMNWVRQAPGKGLEWVARIRSKYNNYATYYADSVKDRFTISRDDSKNTAYLQMNNLKTEDTAVYYCVRHGNFGNSYISYWAYWGQGTLVTVSSGGGGSGGGGSGGGGSQTVVTQEPSLTVSPGGTVTLTCGSSTGAVTSGNYPNWVQQKPGQAPRGLIGGTKFLAPGTPARFSGSLLGGKAALTLSGVQPEDEAEYYCVLWYSNRWVFGGGTKLTVLGGGGDKTHTCPPCPAPELLGGPSVFLFPPKPKDTLMISRTPEVTCVVVDVSHEDPEVKFNWYVDGVEVHNAKTKPCEEQYGSTYRCVSVLTVLHQDWLNGKEYKCKVSNKALPAPIEKTISKAKGQPREPQVYTLPPSREEMTKNQVSLTCLVKGFYPSDIAVEWESNGQPENNYKTTPPVLDSDGSFFLYSKLTVDKSRWQQGNVFSCSVMHEALHNHYTQKSLSLSPGKGGGGSGGGGSGGGGSGGGGSGGGGSGGGGSDKTHTCPPCPAPELLGGPSVFLFPPKPKDTLMISRTPEVTCVVVDVSHEDPEVKFNWYVDGVEVHNAKTKPCEEQYGSTYRCVSVLTVLHQDWLNGKEYKCKVSNKALPAPIEKTISKAKGQPREPQVYTLPPSREEMTKNQVSLTCLVKGFYPSDIAVEWESNGQPENNYKTTPPVLDSDGSFFLYSKLTVDKSRWQQGNVFSCSVMHEALHNHYTQKSLSLSPGK

SEQ ID NO: 871 - protein, 992 aa, artificial
  FL_61xCD3-scFc_delGK
QVQLVESGGGVVQPGRSLRLSCAASGFTFSSYGMHWVRQAPGKGLEWVAVISYEGSNEFYAESVKGRFTISRDNSKNTLYLQMNSLRAEDTAVYYCARGGEITMVRGVIGYYYYGMDVWGQGTTVTVSSGGGGSGGGGSGGGGSDIQMTQSPSSLSASVGDRVTITCRASQSISSYLNWYQQKPGKAPKLLIYAASSLQSGVPSRFSGSGSGTEFTLTISSLQPEDFATYYCLQHNSYPLTFGGGTKVEIKSGGGGSEVQLVESGGGLVQPGGSLKLSCAASGFTFNKYAMNWVRQAPGKGLEWVARIRSKYNNYATYYADSVKDRFTISRDDSKNTAYLQMNNLKTEDTAVYYCVRHGNFGNSYISYWAYWGQGTLVTVSSGGGGSGGGGSGGGGSQTVVTQEPSLTVSPGGTVTLTCGSSTGAVTSGNYPNWVQQKPGQAPRGLIGGTKFLAPGTPARFSGSLLGGKAALTLSGVQPEDEAEYYCVLWYSNRWVFGGGTKLTVLGGGGDKTHTCPPCPAPELLGGPSVFLFPPKPKDTLMISRTPEVTCVVVDVSHEDPEVKFNWYVDGVEVHNAKTKPCEEQYGSTYRCVSVLTVLHQDWLNGKEYKCKVSNKALPAPIEKTISKAKGQPREPQVYTLPPSREEMTKNQVSLTCLVKGFYPSDIAVEWESNGQPENNYKTTPPVLDSDGSFFLYSKLTVDKSRWQQGNVFSCSVMHEALHNHYTQKSLSLSPGGGGSGGGGSGGGGSGGGGSGGGGSGGGGSDKTHTCPPCPAPELLGGPSVFLFPPKPKDTLMISRTPEVTCVVVDVSHEDPEVKFNWYVDGVEVHNAKTKPCEEQYGSTYRCVSVLTVLHQDWLNGKEYKCKVSNKALPAPIEKTISKAKGQPREPQVYTLPPSREEMTKNQVSLTCLVKGFYPSDIAVEWESNGQPENNYKTTPPVLDSDGSFFLYSKLTVDKSRWQQGNVFSCSVMHEALHNHYTQKSLSLSPGK

1. A bispecific antibody construct comprising a first binding domain which binds to human and macaque Fms-like tyrosine kinase 3 (FLT3) on the surface of a target cell and a second binding domain which binds to human CD3 on the surface of a T cell, wherein the first binding domain binds to an epitope of FLT3 which is comprised within the extracellular region of an FLT3 polypeptide comprising the amino acid sequence of SEQ ID NO: 801, 802, 803, or 804.

2. The antibody construct according to claim 1, wherein the first binding domain binds to an epitope of FLT3 which is comprised within the region of human FLT3 comprising the amino acid sequence of SEQ ID NO: 814 (cluster 1) or SEQ ID NO: 816 (cluster 3).

3. The antibody construct according to claim 1, wherein the antibody construct is in a format selected from the group consisting of: (scFv)₂, scFv-single domain mAb, diabodies and oligomers of those formats.

4. The antibody construct according to claim 2, wherein the first binding domain comprises a VH region comprising CDR-H1, CDR-H2 and CDR-H3 and a VL region comprising CDR-L1, CDR-L2 and CDR-L3, wherein said CDR-HI, CDR-H2, CDR-H3, CDR-LI, CDR-L2, and CDR-L3 comprise the amino acid sequences selected from the group consisting of:
SEQ ID NOs: 151-156, SEQ ID NOs: 161-166, SEQ ID NOs: 171-176, SEQ ID NOs: 181-186, SEQ ID NOs: 191-196, SEQ ID NOs: 201-206, SEQ ID NOs: 211-216, SEQ ID NOs: 221-226, SEQ ID NOs: 231-236, SEQ ID NOs: 241-246, SEQ ID NOs: 251-256, SEQ ID NOs: 261-266, SEQ ID NOs: 271-276, SEQ ID NOs: 281-286, SEQ ID NOs: 291-296, SEQ ID NOs: 301-306, SEQ ID NOs: 311-316, SEQ ID NOs: 321-326, SEQ ID NOs: 331-336, SEQ ID NOs: 341-346, SEQ ID NOs: 351-356, SEQ ID NOs: 361-366, SEQ ID NOs: 371-376, SEQ ID NOs: 381-386, SEQ ID NOs: 391-396, SEQ ID NOs: 401-406, SEQ ID NOs: 411-416, SEQ ID NOs: 421-426, SEQ ID NOs: 431-436, SEQ ID NOs: 441-446, SEQ ID NOs: 451-456, SEQ ID NOs: 461-466, SEQ ID NOs: 471-476, SEQ ID NOs: 481-486, SEQ ID NOs: 491-496, SEQ ID NOs: 501-506, SEQ ID NOs: 511-516, SEQ ID NOs: 521-526, SEQ ID NOs: 531-536, SEQ ID NOs: 541-546, SEQ ID NOs: 551-556, SEQ ID NOs: 561-566, SEQ ID NOs: 571-576, SEQ ID NOs: 581-586, SEQ ID NOs: 591-596, SEQ ID NOs: 601-606, SEQ ID NOs: 611-616, SEQ ID NOs: 621-626, SEQ ID NOs: 631-636, SEQ ID NOs: 641-646, SEQ ID NOs: 651-656, SEQ ID NOs: 661-666, SEQ ID NOs: 671-676, SEQ ID NOs: 681-686, SEQ ID NOs: 691-696, SEQ ID NOs: 701-706, SEQ ID NOs: 711-716, SEQ ID NOs: 721-726, SEQ ID NOs: 731-736, SEQ ID NOs: 741-746, SEQ ID NOs: 751-756, SEQ ID NOs: 761-766, SEQ ID NOs: 771-776, SEQ ID NOs: 781-786, and SEQ ID NOs: 791-796.

5. The antibody construct according to claim 4, wherein the first binding domain comprises a VH region comprising the amino acid sequence selected from the group consisting of: SEQ ID NO: 157, SEQ ID NO: 167, SEQ ID NO: 177, SEQ ID NO: 187, SEQ ID NO: 197, SEQ ID NO: 207, SEQ ID NO: 217, SEQ ID NO: 227, SEQ ID NO: 237, SEQ ID NO: 247, SEQ ID NO: 257, SEQ ID NO: 267, SEQ ID NO: 277, SEQ ID NO: 287, SEQ ID NO: 297, SEQ ID NO: 307, SEQ ID NO: 317, SEQ ID NO: 327, SEQ ID NO: 337, SEQ ID NO: 347, SEQ ID NO: 357, SEQ ID NO: 367, SEQ ID NO: 377, SEQ ID NO: 387, SEQ ID NO: 397, SEQ ID NO: 407, SEQ ID NO: 417, SEQ ID NO: 427, SEQ ID NO: 437, SEQ ID NO: 447, SEQ ID NO: 457, SEQ ID NO: 467, SEQ ID NO: 477, SEQ ID NO: 487, SEQ ID NO: 497, SEQ ID NO: 507, SEQ ID NO: 517, SEQ ID NO: 527, SEQ ID NO: 537, SEQ ID NO: 547, SEQ ID NO: 557, SEQ ID NO: 567, SEQ ID NO: 577, SEQ ID NO: 587, SEQ ID NO: 597, SEQ ID NO: 607, SEQ ID NO: 617, SEQ ID NO: 627, SEQ ID NO: 637, SEQ ID NO: 647, SEQ ID NO: 657, SEQ ID NO: 667, SEQ ID NO: 677, SEQ ID NO: 687, SEQ ID NO: 697, SEQ ID NO: 707, SEQ ID NO: 717, SEQ ID NO: 727, SEQ ID NO: 737, SEQ ID NO: 747, SEQ ID NO: 757, SEQ ID NO: 767, SEQ ID NO: 777, SEQ ID NO: 787, and SEQ ID NO: 797.

6. The antibody construct according to claim 4, wherein the first binding domain comprises a VL region comprising the amino acid sequence selected from the group consisting of: SEQ ID NO: 158, SEQ ID NO: 168, SEQ ID NO: 178, SEQ ID NO: 188, SEQ ID NO: 198, SEQ ID NO: 208, SEQ ID NO: 218, SEQ ID NO: 228, SEQ ID NO: 238, SEQ ID NO: 248, SEQ ID NO: 258, SEQ ID NO: 268, SEQ ID NO: 278, SEQ ID NO: 288, SEQ ID NO: 298, SEQ ID NO: 308, SEQ ID NO: 318, SEQ ID NO: 328, SEQ ID NO: 338, SEQ ID NO: 348, SEQ ID NO: 358, SEQ ID NO: 368, SEQ ID NO: 378, SEQ ID NO: 388, SEQ ID NO: 398, SEQ ID NO: 408, SEQ ID NO: 418, SEQ ID NO: 428, SEQ ID NO: 438, SEQ ID NO: 448, SEQ ID NO: 458, SEQ ID NO: 468, SEQ ID NO: 478, SEQ ID NO: 488, SEQ ID NO: 498, SEQ ID NO: 508, SEQ ID NO: 518, SEQ ID NO: 528, SEQ ID NO: 538, SEQ ID NO: 548, SEQ ID NO: 558, SEQ ID NO: 568, SEQ ID NO: 578, SEQ ID NO: 588, SEQ ID NO: 598, SEQ ID NO: 608, SEQ ID NO: 618, SEQ ID NO: 628, SEQ ID NO: 638, SEQ ID NO: 648, SEQ ID NO: 658, SEQ ID NO: 668, SEQ ID NO: 678, SEQ ID NO: 688, SEQ ID NO: 698, SEQ ID NO: 708, SEQ ID NO: 718, SEQ ID NO: 728, SEQ ID NO: 738, SEQ ID NO: 748, SEQ ID NO: 758, SEQ ID NO: 768, SEQ ID NO: 778, SEQ ID NO: 788, and SEQ ID NO: 798.

7. The antibody construct according to claim 4, wherein the first binding domain comprises a VH region and a VL region comprising the pair of amino acid sequences, respectively, selected from the group consisting of: SEQ ID NOs: 157+158, SEQ ID NOs: 167+168, SEQ ID NOs: 177+178, SEQ ID NOs: 187+188, SEQ ID NOs: 197+198, SEQ ID NOs: 207+208, SEQ ID NOs: 217+218, SEQ ID NOs: 227+228, SEQ ID NOs: 237+238, SEQ ID NOs: 247+248, SEQ ID NOs: 257+258, SEQ ID NOs: 267+268, SEQ ID NOs: 277+278, SEQ ID NOs: 287+288, SEQ ID NOs: 297+298, SEQ ID NOs: 307+308, SEQ ID NOs: 317+318, SEQ ID NOs: 327+328, SEQ ID NOs: 337+338, SEQ ID NOs: 347+348, SEQ ID NOs: 357+358, SEQ ID NOs: 367+368, SEQ ID NOs: 377+378, SEQ ID NOs: 387+388, SEQ ID NOs: 397+398, SEQ ID NOs: 407+408, SEQ ID NOs: 417+418, SEQ ID NOs: 427+428, SEQ ID NOs: 437+438, SEQ ID NOs: 447+448, SEQ ID NOs: 457+458, SEQ ID NOs: 467+468, SEQ ID NOs: 477+478, SEQ ID NOs: 487+488, SEQ ID NOs: 497+498, SEQ ID NOs: 507+508, SEQ ID NOs: 517+518, SEQ ID NOs: 527+528, SEQ ID NOs: 537+538, SEQ ID NOs: 547+548, SEQ ID NOs: 557+558, SEQ ID NOs: 567+568, SEQ ID NOs: 577+578, SEQ ID NOs: 587+588, SEQ ID NOs: 597+598, SEQ ID NOs: 607+608, SEQ ID NOs: 617+618, SEQ ID NOs: 627+628, SEQ ID NOs: 637+638, SEQ ID NOs: 647+648, SEQ ID NOs: 657+658, SEQ ID NOs: 667+668, SEQ ID NOs: 677+678, SEQ ID NOs: 687+688, SEQ ID NOs: 697+698, SEQ ID NOs: 707+708, SEQ ID NOs: 717+718, SEQ ID NOs: 727+728, SEQ ID NOs: 737+738, SEQ ID NOs: 747+748, SEQ ID NOs: 757+758, SEQ ID NOs: 767+768, SEQ ID NOs: 777+778, SEQ ID NOs: 787+788, and SEQ ID NOs: 797+798.

8. The antibody construct according to claim 4, wherein the first binding domain comprises the amino acid sequence selected from the group consisting of: SEQ ID NO: 159, SEQ ID NO: 169, SEQ ID NO: 179, SEQ ID NO: 189, SEQ ID NO: 199, SEQ ID NO: 209, SEQ ID NO: 219, SEQ ID NO: 229, SEQ ID NO: 239, SEQ ID NO: 249, SEQ ID NO: 259, SEQ ID NO: 269, SEQ ID NO: 279, SEQ ID NO: 289, SEQ ID NO: 299, SEQ ID NO: 309, SEQ ID NO: 319, SEQ ID NO: 329, SEQ ID NO: 339, SEQ ID NO: 349, SEQ ID NO: 359, SEQ ID NO: 369, SEQ ID NO: 379, SEQ ID NO: 389, SEQ ID NO: 399, SEQ ID NO: 409, SEQ ID NO: 419, SEQ ID NO: 429, SEQ ID NO: 439, SEQ ID NO: 449, SEQ ID NO: 459, SEQ ID NO: 469, SEQ ID NO: 479, SEQ ID NO: 489, SEQ ID NO: 499, SEQ ID NO: 509, SEQ ID NO: 519, SEQ ID NO: 529, SEQ ID NO: 539, SEQ ID NO: 549, SEQ ID NO: 559, SEQ ID NO: 569, SEQ ID NO: 579, SEQ ID NO: 589, SEQ ID NO: 599, SEQ ID NO: 609, SEQ ID NO: 619, SEQ ID NO: 629, SEQ ID NO: 639, SEQ ID NO: 649, SEQ ID NO: 659, SEQ ID NO: 669, SEQ ID NO: 679, SEQ ID NO: 689, SEQ ID NO: 699, SEQ ID NO: 709, SEQ ID NO: 719, SEQ ID NO: 729, SEQ ID NO: 739, SEQ ID NO: 749, SEQ ID NO: 759, SEQ ID NO: 769, SEQ ID NO: 779, SEQ ID NO: 789, and SEQ ID NO: 799.

9. The antibody construct according to claim 1, wherein the second binding domain binds to human CD3 epsilon and to Callithrix jacchus, Saguinus Oedipus or Saimiri sciureus CD3 epsilon.

10. The antibody construct according to claim 1, comprising:
(a) a polypeptide comprising in the following order starting from the N-terminus:
a polypeptide comprising the amino acid sequence selected from the group consisting of: SEQ ID NO: 159, SEQ ID NO: 169, SEQ ID NO: 179, SEQ ID NO: 189, SEQ ID NO: 199, SEQ ID NO: 209, SEQ ID NO: 219, SEQ ID NO: 229, SEQ ID NO: 239, SEQ ID NO: 249, SEQ ID NO: 259, SEQ ID NO: 269, SEQ ID NO: 279, SEQ ID NO: 289, SEQ ID NO: 299, SEQ ID NO: 309, SEQ ID NO: 319, SEQ ID NO: 329, SEQ ID NO: 339, SEQ ID NO: 349, SEQ ID NO: 359, SEQ ID NO: 369, SEQ ID NO: 379, SEQ ID NO: 389, SEQ ID NO: 399, SEQ ID NO: 409, SEQ ID NO: 419, SEQ ID NO: 429, SEQ ID NO: 439, SEQ ID NO: 449, SEQ ID NO: 459, SEQ ID NO: 469, SEQ ID NO: 479, SEQ ID NO: 489, SEQ ID NO: 499, SEQ ID NO: 509, SEQ ID NO: 519, SEQ ID NO: 529, SEQ ID NO: 539, SEQ ID NO: 549, SEQ ID NO: 559, SEQ ID NO: 569, SEQ ID NO: 579, SEQ ID NO: 589, SEQ ID NO: 599, SEQ ID NO: 609, SEQ ID NO: 619, SEQ ID NO: 629, SEQ ID NO: 639, SEQ ID NO: 649, SEQ ID NO: 659, SEQ ID NO: 669, SEQ ID NO: 679, SEQ ID NO: 689, SEQ ID NO: 699, SEQ ID NO: 709, SEQ ID NO: 719, SEQ ID NO: 729, SEQ ID NO: 739, SEQ ID NO: 749, SEQ ID NO: 759, SEQ ID NO: 769, SEQ ID NO: 779, SEQ ID NO: 789, and SEQ ID NO: 799;
a peptide linker comprising the amino acid sequence selected from any one of SEQ ID NOs: 1-9; and
a polypeptide comprising the amino acid sequence selected from the group consisting of: SEQ ID NO: 19, SEQ ID NO: 28, SEQ ID NO: 37, SEQ ID NO: 46, SEQ ID NO: 55, SEQ ID NO: 64, SEQ ID NO: 73, SEQ ID NO: 82, SEQ ID NO: 91, SEQ ID NO: 100, and SEQ ID NO: 103; and
optionally a His-tag comprising the amino acid sequence of SEQ ID NO: 10;
(b) a polypeptide comprising in following order starting from the N-terminus:
a polypeptide comprising the amino acid sequence selected from the group consisting of: SEQ ID NO: 159, SEQ ID NO: 169, SEQ ID NO: 179, SEQ ID NO: 189, SEQ ID NO: 199, SEQ ID NO: 209, SEQ ID NO: 219, and SEQ ID NO: 229, SEQ ID NO: 239, SEQ ID NO: 249, SEQ ID NO: 259, SEQ ID NO: 269, SEQ ID NO: 279, SEQ ID NO: 289, SEQ ID NO: 299, SEQ ID NO: 309, SEQ ID NO: 319, SEQ ID NO: 329, SEQ ID NO: 339, SEQ ID NO: 349, SEQ ID NO: 359, SEQ ID NO: 369, SEQ ID NO: 379, SEQ ID NO: 389, SEQ ID NO: 399, SEQ ID NO: 409, SEQ ID NO: 419, SEQ ID NO: 429, SEQ ID NO: 439, SEQ ID NO: 449, SEQ ID NO: 459, SEQ ID NO: 469, SEQ ID NO: 479, SEQ ID NO: 489, SEQ ID NO: 499, SEQ ID NO: 509, SEQ ID NO: 519, SEQ ID NO: 529, SEQ ID NO: 539, SEQ ID NO: 549, SEQ ID NO: 559, SEQ ID NO: 569, SEQ ID NO: 579, SEQ ID NO: 589, SEQ ID NO: 599, SEQ ID NO: 609, SEQ ID NO: 619, SEQ ID NO: 629, SEQ ID NO: 639, SEQ ID NO: 649, SEQ ID NO: 659, SEQ ID NO: 669, SEQ ID NO: 679, SEQ ID NO: 689, SEQ ID NO: 699, SEQ ID NO: 709, SEQ ID NO: 719, SEQ ID NO: 729, SEQ ID NO: 739, SEQ ID NO: 749, SEQ ID NO: 759, SEQ ID NO: 769, SEQ ID NO: 779, SEQ ID NO: 789, and SEQ ID NO: 799;
a peptide linker comprising the amino acid sequence selected from any one of SEQ ID NOs: 1-9;
a polypeptide comprising the amino acid sequence selected from the group consisting of: SEQ ID NO: 19, SEQ ID NO: 28, SEQ ID NO: 37, SEQ ID NO: 46, SEQ ID NO: 55, SEQ ID NO: 64, SEQ ID NO: 73, SEQ ID NO: 82, SEQ ID NO: 91, SEQ ID NO: 100, and SEQ ID NO: 103
optionally peptide linker comprising the amino acid sequence selected from any one of SEQ ID NOs: 1-9;
a polypeptide comprising the amino acid sequence selected from the group consisting of: SEQ ID NOs: 104-134; and
optionally a His-tag comprising the amino acid sequence of SEQ ID NO: 10;
(c) a polypeptide comprising in the following order starting from the N-terminus:
a polypeptide comprising the amino acid sequence QRFVTGHFGGLX₁PANG (SEQ ID NO: 135) wherein X₁ is Y or H; and
a polypeptide having an amino acid sequence selected from the group consisting of: SEQ ID NO: 159, SEQ ID NO: 169, SEQ ID NO: 179, SEQ ID NO: 189, SEQ ID NO: 199, SEQ ID NO: 209, SEQ ID NO: 219, and SEQ ID NO: 229, SEQ ID NO: 239, SEQ ID NO: 249, and SEQ ID NO: 259, SEQ ID NO: 269, SEQ ID NO: 279, and SEQ ID NO: 289, SEQ ID NO: 299, SEQ ID NO: 309, SEQ ID NO: 319, and SEQ ID NO: 329, SEQ ID NO: 339, SEQ ID NO: 349, and SEQ ID NO: 359, SEQ ID NO: 369, SEQ ID NO: 379, and SEQ ID NO: 389, SEQ ID NO: 399, SEQ ID NO: 409, SEQ ID NO: 419, and SEQ ID NO: 429, SEQ ID NO: 439, SEQ ID NO: 449, and SEQ ID NO: 459, SEQ ID NO: 469, SEQ ID NO: 479, and SEQ ID NO: 489, SEQ ID NO: 499, SEQ ID NO: 509, SEQ ID NO: 519, and SEQ ID NO: 529, SEQ ID NO: 539, SEQ ID NO: 549, and SEQ ID NO: 559, SEQ ID NO: 569, SEQ ID NO: 579, and SEQ ID NO: 589, SEQ ID NO: 599, SEQ ID NO: 609, SEQ ID NO: 619, and SEQ ID NO: 629, SEQ ID NO: 639, SEQ ID NO: 649, and SEQ ID NO: 659, SEQ ID NO: 669, SEQ ID NO: 679, and SEQ ID NO: 689, SEQ ID NO: 699, SEQ ID NO: 709, SEQ ID NO: 719, and SEQ ID NO: 729, SEQ ID NO: 739, SEQ ID NO: 749, and SEQ ID NO: 759, SEQ ID NO: 769, SEQ ID NO: 779, and SEQ ID NO: 789, and SEQ ID NO: 799;
a peptide linker having an amino acid sequence selected from the group consisting of: SEQ ID NOs: 1-9;
a polypeptide having an amino acid sequence selected from the group consisting of: SEQ ID NO: 19, SEQ ID NO: 28, SEQ ID NO: 37, SEQ ID NO: 46, SEQ ID NO: 55, SEQ ID NO: 64, SEQ ID NO: 73, SEQ ID NO: 82, SEQ ID NO: 91, SEQ ID NO: 100, and SEQ ID NO: 103;
a polypeptide having the amino acid sequence QRFVTGHFGGLHPANG (SEQ ID NO: 137) or QRFCTGHFGGLHPCNG (SEQ ID NO: 139); and
optionally a His-tag comprising the amino acid sequence of SEQ ID NO: 10;
(d) a polypeptide comprising in the following order starting from the N-terminus
a polypeptide having an amino acid sequence selected from the group consisting of: SEQ ID NO: 17, SEQ ID NO: 26, SEQ ID NO: 35, SEQ ID NO: 44, SEQ ID NO: 53, SEQ ID NO: 62, SEQ ID NO: 71, SEQ ID NO: 80, SEQ ID NO: 89, SEQ ID NO: 98, and SEQ ID NO: 101;
a peptide linker comprising the amino acid sequence of SEQ ID NO: 8;
a polypeptide comprising the amino acid sequence selected from the group consisting of: SEQ ID NO: 158, SEQ ID NO: 168, SEQ ID NO: 178, SEQ ID NO: 188, SEQ ID NO: 198, SEQ ID NO: 208, SEQ ID NO: 218, SEQ ID NO: 228, SEQ ID NO: 238, SEQ ID NO: 248, SEQ ID NO: 258, SEQ ID NO: 268, SEQ ID NO: 278, SEQ ID NO: 288, SEQ ID NO: 298, SEQ ID NO: 308, SEQ ID NO: 318, SEQ ID NO: 328, SEQ ID NO: 338, SEQ ID NO: 348, SEQ ID NO: 358, SEQ ID NO: 368, SEQ ID NO: 378, SEQ ID NO: 388, SEQ ID NO: 398, SEQ ID NO: 408, SEQ ID NO: 418, SEQ ID NO: 428, SEQ ID NO: 438, SEQ ID NO: 448, SEQ ID NO: 458, SEQ ID NO: 468, SEQ ID NO: 478, SEQ ID NO: 488, SEQ ID NO: 498, SEQ ID NO: 508, SEQ ID NO: 518, SEQ ID NO: 528, SEQ ID NO: 538, SEQ ID NO: 548, SEQ ID NO: 558, SEQ ID NO: 568, SEQ ID NO: 578, SEQ ID NO: 588, SEQ ID NO: 598, SEQ ID NO: 608, SEQ ID NO: 618, SEQ ID NO: 628, SEQ ID NO: 638, SEQ ID NO: 648, SEQ ID NO: 658, SEQ ID NO: 668, SEQ ID NO: 678, SEQ ID NO: 688, SEQ ID NO: 698, SEQ ID NO: 708, SEQ ID NO: 718, SEQ ID NO: 728, SEQ ID NO: 738, SEQ ID NO: 748, SEQ ID NO: 758, SEQ ID NO: 768, SEQ ID NO: 778, SEQ ID NO: 788, and SEQ ID NO: 798 and a serine residue at the C-terminus;
a polypeptide comprising the amino acid sequence of SEQ ID NO: 140; and
a polypeptide comprising in the following order starting from the N-terminus:
a polypeptide comprising the amino acid sequence selected from the group consisting of: SEQ ID NO: 157, SEQ ID NO: 167, SEQ ID NO: 177, SEQ ID NO: 187, SEQ ID NO: 197, SEQ ID NO: 207, SEQ ID NO: 217, SEQ ID NO: 227, SEQ ID NO: 237, SEQ ID NO: 247, SEQ ID NO: 257, SEQ ID NO: 267, SEQ ID NO: 277, SEQ ID NO: 287, SEQ ID NO: 297, SEQ ID NO: 307, SEQ ID NO: 317, SEQ ID NO: 327, SEQ ID NO: 337, SEQ ID NO: 347, SEQ ID NO: 357, SEQ ID NO: 367, SEQ ID NO: 377, SEQ ID NO: 387, SEQ ID NO: 397, SEQ ID NO: 407, SEQ ID NO: 417, SEQ ID NO: 427, SEQ ID NO: 437, SEQ ID NO: 447, SEQ ID NO: 457, SEQ ID NO: 467, SEQ ID NO: 477, SEQ ID NO: 487, SEQ ID NO: 497, SEQ ID NO: 507, SEQ ID NO: 517, SEQ ID NO: 527, SEQ ID NO: 537, SEQ ID NO: 547, SEQ ID NO: 557, SEQ ID NO: 567, SEQ ID NO: 577, SEQ ID NO: 587, SEQ ID NO: 597, SEQ ID NO: 607, SEQ ID NO: 617, SEQ ID NO: 627, SEQ ID NO: 637, SEQ ID NO: 647, SEQ ID NO: 657, SEQ ID NO: 667, SEQ ID NO: 677, SEQ ID NO: 687, SEQ ID NO: 697, SEQ ID NO: 707, SEQ ID NO: 717, SEQ ID NO: 727, SEQ ID NO: 737, SEQ ID NO: 747, SEQ ID NO: 757, SEQ ID NO: 767, SEQ ID NO: 777, SEQ ID NO: 787, and SEQ ID NO: 797;
a peptide linker comprising the amino acid sequence of SEQ ID NO: 8;
a polypeptide comprising the amino acid sequence selected from the group consisting of: SEQ ID NO: 18, SEQ ID NO: 27, SEQ ID NO: 36, SEQ ID NO: 45, SEQ ID NO: 54, SEQ ID NO: 63, SEQ ID NO: 72, SEQ ID NO: 81, SEQ ID NO: 90, SEQ ID NO: 99, and SEQ ID NO: 102 and a serine residue at the C-terminus;
a polypeptide comprising the amino acid sequence of SEQ ID NO: 141;
(e) a polypeptide comprising in the following order starting from the N-terminus:
a polypeptide comprising the amino acid sequence selected from the group consisting of: SEQ ID NO: 17, SEQ ID NO: 26, SEQ ID NO: 35, SEQ ID NO: 44, SEQ ID NO: 53, SEQ ID NO: 62, SEQ ID NO: 71, SEQ ID NO: 80, SEQ ID NO: 89, SEQ ID NO: 98, and SEQ ID NO: 101;
a peptide linker comprising the amino acid sequence of SEQ ID NO: 8;
a polypeptide comprising the amino acid sequence selected from the group consisting of: SEQ ID NO: 158, SEQ ID NO: 168, SEQ ID NO: 178, SEQ ID NO: 188, SEQ ID NO: 198, SEQ ID NO: 208, SEQ ID NO: 218, SEQ ID NO: 228, SEQ ID NO: 238, SEQ ID NO: 248, SEQ ID NO: 258, SEQ ID NO: 268, SEQ ID NO: 278, SEQ ID NO: 288, SEQ ID NO: 298, SEQ ID NO: 308, SEQ ID NO: 318, SEQ ID NO: 328, SEQ ID NO: 338, SEQ ID NO: 348, SEQ ID NO: 358, SEQ ID NO: 368, SEQ ID NO: 378, SEQ ID NO: 388, SEQ ID NO: 398, SEQ ID NO: 408, SEQ ID NO: 418, SEQ ID NO: 428, SEQ ID NO: 438, SEQ ID NO: 448, SEQ ID NO: 458, SEQ ID NO: 468, SEQ ID NO: 478, SEQ ID NO: 488, SEQ ID NO: 498, SEQ ID NO: 508, SEQ ID NO: 518, SEQ ID NO: 528, SEQ ID NO: 538, SEQ ID NO: 548, SEQ ID NO: 558, SEQ ID NO: 568, SEQ ID NO: 578, SEQ ID NO: 588, SEQ ID NO: 598, SEQ ID NO: 608, SEQ ID NO: 618, SEQ ID NO: 628, SEQ ID NO: 638, SEQ ID NO: 648, SEQ ID NO: 658, SEQ ID NO: 668, SEQ ID NO: 678, SEQ ID NO: 688, SEQ ID NO: 698, SEQ ID NO: 708, SEQ ID NO: 718, SEQ ID NO: 728, SEQ ID NO: 738, SEQ ID NO: 748, SEQ ID NO: 758, SEQ ID NO: 768, SEQ ID NO: 778, SEQ ID NO: 788, and SEQ ID NO: 798;
a polypeptide comprising the amino acid sequence of SEQ ID NO: 142; and
a polypeptide comprising in the following order starting from the N-terminus:
a polypeptide comprising the amino acid sequence selected from the group consisting of: SEQ ID NO: 157, SEQ ID NO: 167, SEQ ID NO: 177, SEQ ID NO: 187, SEQ ID NO: 197, SEQ ID NO: 207, SEQ ID NO: 217, SEQ ID NO: 227, SEQ ID NO: 237, SEQ ID NO: 247, SEQ ID NO: 257, SEQ ID NO: 267, SEQ ID NO: 277, SEQ ID NO: 287, SEQ ID NO: 297, SEQ ID NO: 307, SEQ ID NO: 317, SEQ ID NO: 327, SEQ ID NO: 337, SEQ ID NO: 347, SEQ ID NO: 357, SEQ ID NO: 367, SEQ ID NO: 377, SEQ ID NO: 387, SEQ ID NO: 397, SEQ ID NO: 407, SEQ ID NO: 417, SEQ ID NO: 427, SEQ ID NO: 437, SEQ ID NO: 447, SEQ ID NO: 457, SEQ ID NO: 467, SEQ ID NO: 477, SEQ ID NO: 487, SEQ ID NO: 497, SEQ ID NO: 507, SEQ ID NO: 517, SEQ ID NO: 527, SEQ ID NO: 537, SEQ ID NO: 547, SEQ ID NO: 557, SEQ ID NO: 567, SEQ ID NO: 577, SEQ ID NO: 587, SEQ ID NO: 597, SEQ ID NO: 607, SEQ ID NO: 617, SEQ ID NO: 627, SEQ ID NO: 637, SEQ ID NO: 647, SEQ ID NO: 657, SEQ ID NO: 667, SEQ ID NO: 677, SEQ ID NO: 687, SEQ ID NO: 697, SEQ ID NO: 707, SEQ ID NO: 717, SEQ ID NO: 727, SEQ ID NO: 737, SEQ ID NO: 747, SEQ ID NO: 757, SEQ ID NO: 767, SEQ ID NO: 777, SEQ ID NO: 787, and SEQ ID NO: 797;
a peptide linker comprising the amino acid sequence of SEQ ID NO: 8;
a polypeptide comprising the amino acid sequence selected from the group consisting of: SEQ ID NO: 18, SEQ ID NO: 27, SEQ ID NO: 36, SEQ ID NO: 45, SEQ ID NO: 54, SEQ ID NO: 63, SEQ ID NO: 72, SEQ ID NO: 81, SEQ ID NO: 90, SEQ ID NO: 99, and SEQ ID NO: 102, and a serine residue at the C-terminus;
a polypeptide comprising the amino acid sequence of SEQ ID NO: 143;
(f) a polypeptide comprising in the following order starting from the N-terminus:
a polypeptide comprising the amino acid sequence selected from the group consisting of: SEQ ID NO: 159, SEQ ID NO: 169, SEQ ID NO: 179, SEQ ID NO: 189, SEQ ID NO: 199, SEQ ID NO: 209, SEQ ID NO: 219, SEQ ID NO: 229, SEQ ID NO: 239, SEQ ID NO: 249, SEQ ID NO: 259, SEQ ID NO: 269, SEQ ID NO: 279, SEQ ID NO: 289, SEQ ID NO: 299, SEQ ID NO: 309, SEQ ID NO: 319, SEQ ID NO: 329, SEQ ID NO: 339, SEQ ID NO: 349, SEQ ID NO: 359, SEQ ID NO: 369, SEQ ID NO: 379, SEQ ID NO: 389, SEQ ID NO: 399, SEQ ID NO: 409, SEQ ID NO: 419, SEQ ID NO: 429, SEQ ID NO: 439, SEQ ID NO: 449, SEQ ID NO: 459, SEQ ID NO: 469, SEQ ID NO: 479, SEQ ID NO: 489, SEQ ID NO: 499, SEQ ID NO: 509, SEQ ID NO: 519, SEQ ID NO: 529, SEQ ID NO: 539, SEQ ID NO: 549, SEQ ID NO: 559, SEQ ID NO: 569, SEQ ID NO: 579, SEQ ID NO: 589, SEQ ID NO: 599, SEQ ID NO: 609, SEQ ID NO: 619, SEQ ID NO: 629, SEQ ID NO: 639, SEQ ID NO: 649, SEQ ID NO: 659, SEQ ID NO: 669, SEQ ID NO: 679, SEQ ID NO: 689, SEQ ID NO: 699, SEQ ID NO: 709, SEQ ID NO: 719, SEQ ID NO: 729, SEQ ID NO: 739, SEQ ID NO: 749, SEQ ID NO: 759, SEQ ID NO: 769, SEQ ID NO: 779, SEQ ID NO: 789, and SEQ ID NO: 799;
a peptide linker comprising the amino acid sequence selected from any one of SEQ ID NOs: 1-9; and
a polypeptide comprising the amino acid sequence selected from the group consisting of: SEQ ID NO: 19, SEQ ID NO: 28, SEQ ID NO: 37, SEQ ID NO: 46, SEQ ID NO: 55, SEQ ID NO: 64, SEQ ID NO: 73, SEQ ID NO: 82, SEQ ID NO: 91, SEQ ID NO: 100, and SEQ ID NO: 103; and
a polypeptide comprising the amino acid sequence of SEQ ID NO: 144; and
a polypeptide comprising the amino acid sequence of SEQ ID NO: 145;
(g) a polypeptide comprising in the following order starting from the N-terminus:
a polypeptide comprising the amino acid sequence selected from the group consisting of: SEQ ID NO: 159, SEQ ID NO: 169, SEQ ID NO: 179, SEQ ID NO: 189, SEQ ID NO: 199, SEQ ID NO: 209, SEQ ID NO: 219, SEQ ID NO: 229, SEQ ID NO: 239, SEQ ID NO: 249, SEQ ID NO: 259, SEQ ID NO: 269, SEQ ID NO: 279, SEQ ID NO: 289, SEQ ID NO: 299, SEQ ID NO: 309, SEQ ID NO: 319, SEQ ID NO: 329, SEQ ID NO: 339, SEQ ID NO: 349, SEQ ID NO: 359, SEQ ID NO: 369, SEQ ID NO: 379, SEQ ID NO: 389, SEQ ID NO: 399, SEQ ID NO: 409, SEQ ID NO: 419, SEQ ID NO: 429, SEQ ID NO: 439, SEQ ID NO: 449, SEQ ID NO: 459, SEQ ID NO: 469, SEQ ID NO: 479, SEQ ID NO: 489, SEQ ID NO: 499, SEQ ID NO: 509, SEQ ID NO: 519, SEQ ID NO: 529, SEQ ID NO: 539, SEQ ID NO: 549, SEQ ID NO: 559, SEQ ID NO: 569, SEQ ID NO: 579, SEQ ID NO: 589, SEQ ID NO: 599, SEQ ID NO: 609, SEQ ID NO: 619, SEQ ID NO: 629, SEQ ID NO: 639, SEQ ID NO: 649, SEQ ID NO: 659, SEQ ID NO: 669, SEQ ID NO: 679, SEQ ID NO: 689, SEQ ID NO: 699, SEQ ID NO: 709, SEQ ID NO: 719, SEQ ID NO: 729, SEQ ID NO: 739, SEQ ID NO: 749, SEQ ID NO: 759, SEQ ID NO: 769, SEQ ID NO: 779, SEQ ID NO: 789, and SEQ ID NO: 799; and
a polypeptide comprising the amino acid sequence of SEQ ID NO: 146; and
a polypeptide comprising in the following order starting from the N-terminus:
a polypeptide comprising the amino acid sequence selected from the group consisting of: SEQ ID NO: 19, SEQ ID NO: 28, SEQ ID NO: 37, SEQ ID NO: 46, SEQ ID NO: 55, SEQ ID NO: 64, SEQ ID NO: 73, SEQ ID NO: 82, SEQ ID NO: 91, SEQ ID NO: 100, and SEQ ID NO: 103; and
a polypeptide comprising the amino acid sequence of SEQ ID NO: 147;
(h) a polypeptide comprising in the following order starting from the N-terminus:
a polypeptide comprising the amino acid sequence selected from the group consisting of: SEQ ID NO: 159, SEQ ID NO: 169, SEQ ID NO: 179, SEQ ID NO: 189, SEQ ID NO: 199, SEQ ID NO: 209, SEQ ID NO: 219, SEQ ID NO: 229, SEQ ID NO: 239, SEQ ID NO: 249, SEQ ID NO: 259, SEQ ID NO: 269, SEQ ID NO: 279, SEQ ID NO: 289, SEQ ID NO: 299, SEQ ID NO: 309, SEQ ID NO: 319, SEQ ID NO: 329, SEQ ID NO: 339, SEQ ID NO: 349, SEQ ID NO: 359, SEQ ID NO: 369, SEQ ID NO: 379, SEQ ID NO: 389, SEQ ID NO: 399, SEQ ID NO: 409, SEQ ID NO: 419, SEQ ID NO: 429, SEQ ID NO: 439, SEQ ID NO: 449, SEQ ID NO: 459, SEQ ID NO: 469, SEQ ID NO: 479, SEQ ID NO: 489, SEQ ID NO: 499, SEQ ID NO: 509, SEQ ID NO: 519, SEQ ID NO: 529, SEQ ID NO: 539, SEQ ID NO: 549, SEQ ID NO: 559, SEQ ID NO: 569, SEQ ID NO: 579, SEQ ID NO: 589, SEQ ID NO: 599, SEQ ID NO: 609, SEQ ID NO: 619, SEQ ID NO: 629, SEQ ID NO: 639, SEQ ID NO: 649, SEQ ID NO: 659, SEQ ID NO: 669, SEQ ID NO: 679, SEQ ID NO: 689, SEQ ID NO: 699, SEQ ID NO: 709, SEQ ID NO: 719, SEQ ID NO: 729, SEQ ID NO: 739, SEQ ID NO: 749, SEQ ID NO: 759, SEQ ID NO: 769, SEQ ID NO: 779, SEQ ID NO: 789, and SEQ ID NO: 799; and
a polypeptide comprising the amino acid sequence of SEQ ID NO: 148; and
a polypeptide comprising in the following order starting from the N-terminus:
a polypeptide comprising the amino acid sequence selected from the group consisting of: SEQ ID NO: 19, SEQ ID NO: 28, SEQ ID NO: 37, SEQ ID NO: 46, SEQ ID NO: 55, SEQ ID NO: 64, SEQ ID NO: 73, SEQ ID NO: 82, SEQ ID NO: 91, SEQ ID NO: 100, and SEQ ID NO: 103; and
a polypeptide comprising the amino acid sequence of SEQ ID NO: 149; or
(i) a polypeptide comprising in the following order starting from the N-terminus:
a polypeptide comprising the amino acid sequence selected from the group consisting of: SEQ ID NO: 159, SEQ ID NO: 169, SEQ ID NO: 179, SEQ ID NO: 189, SEQ ID NO: 199, SEQ ID NO: 209, SEQ ID NO: 219, SEQ ID NO: 229, SEQ ID NO: 239, SEQ ID NO: 249, SEQ ID NO: 259, SEQ ID NO: 269, SEQ ID NO: 279, SEQ ID NO: 289, SEQ ID NO: 299, SEQ ID NO: 309, SEQ ID NO: 319, SEQ ID NO: 329, SEQ ID NO: 339, SEQ ID NO: 349, SEQ ID NO: 359, SEQ ID NO: 369, SEQ ID NO: 379, SEQ ID NO: 389, SEQ ID NO: 399, SEQ ID NO: 409, SEQ ID NO: 419, SEQ ID NO: 429, SEQ ID NO: 439, SEQ ID NO: 449, SEQ ID NO: 459, SEQ ID NO: 469, SEQ ID NO: 479, SEQ ID NO: 489, SEQ ID NO: 499, SEQ ID NO: 509, SEQ ID NO: 519, SEQ ID NO: 529, SEQ ID NO: 539, SEQ ID NO: 549, SEQ ID NO: 559, SEQ ID NO: 569, SEQ ID NO: 579, SEQ ID NO: 589, SEQ ID NO: 599, SEQ ID NO: 609, SEQ ID NO: 619, SEQ ID NO: 629, SEQ ID NO: 639, SEQ ID NO: 649, SEQ ID NO: 659, SEQ ID NO: 669, SEQ ID NO: 679, SEQ ID NO: 689, SEQ ID NO: 699, SEQ ID NO: 709, SEQ ID NO: 719, SEQ ID NO: 729, SEQ ID NO: 739, SEQ ID NO: 749, SEQ ID NO: 759, SEQ ID NO: 769, SEQ ID NO: 779, SEQ ID NO: 789, and SEQ ID NO: 799;
a peptide linker comprising the amino acid sequence selected from any one of SEQ ID NOs: 1-9; and
a polypeptide comprising the amino acid sequence selected from the group consisting of: SEQ ID NO: 19, SEQ ID NO: 28, SEQ ID NO: 37, SEQ ID NO: 46, SEQ ID NO: 55, SEQ ID NO: 64, SEQ ID NO: 73, SEQ ID NO: 82, SEQ ID NO: 91, SEQ ID NO: 100, and SEQ ID NO: 103; and
a polypeptide comprising the amino acid sequence of SEQ ID NO: 150.
(j) a polypeptide comprising in the following order starting from the N-terminus:
a polypeptide comprising the amino acid sequence selected from the group consisting of: SEQ ID NO: 159, SEQ ID NO: 169, SEQ ID NO: 179, SEQ ID NO: 189, SEQ ID NO: 199, SEQ ID NO: 209, SEQ ID NO: 219, SEQ ID NO: 229, SEQ ID NO: 239, SEQ ID NO: 249, SEQ ID NO: 259, SEQ ID NO: 269, SEQ ID NO: 279, SEQ ID NO: 289, SEQ ID NO: 299, SEQ ID NO: 309, SEQ ID NO: 319, SEQ ID NO: 329, SEQ ID NO: 339, SEQ ID NO: 349, SEQ ID NO: 359, SEQ ID NO: 369, SEQ ID NO: 379, SEQ ID NO: 389, SEQ ID NO: 399, SEQ ID NO: 409, SEQ ID NO: 419, SEQ ID NO: 429, SEQ ID NO: 439, SEQ ID NO: 449, SEQ ID NO: 459, SEQ ID NO: 469, SEQ ID NO: 479, SEQ ID NO: 489, SEQ ID NO: 499, SEQ ID NO: 509, SEQ ID NO: 519, SEQ ID NO: 529, SEQ ID NO: 539, SEQ ID NO: 549, SEQ ID NO: 559, SEQ ID NO: 569, SEQ ID NO: 579, SEQ ID NO: 589, SEQ ID NO: 599, SEQ ID NO: 609, SEQ ID NO: 619, SEQ ID NO: 629, SEQ ID NO: 639, SEQ ID NO: 649, SEQ ID NO: 659, SEQ ID NO: 669, SEQ ID NO: 679, SEQ ID NO: 689, SEQ ID NO: 699, SEQ ID NO: 709, SEQ ID NO: 719, and SEQ ID NO: 729, SEQ ID NO: 739, SEQ ID NO: 749, and SEQ ID NO: 759, SEQ ID NO: 769, SEQ ID NO: 779, and SEQ ID NO: 789, and SEQ ID NO: 799;
a peptide linker comprising the amino acid sequence selected from any one of SEQ ID NOs: 1-9; and
a polypeptide comprising the amino acid sequence selected from the group consisting of: SEQ ID NO: 19, SEQ ID NO: 28, SEQ ID NO: 37, SEQ ID NO: 46, SEQ ID NO: 55, SEQ ID NO: 64, SEQ ID NO: 73, SEQ ID NO: 82, SEQ ID NO: 91, SEQ ID NO: 100, and SEQ ID NO: 103;
a peptide linker having an amino acid sequence selected from the group consisting of: SEQ ID NOs: 1-9; and; and
the third domain comprising the amino acid sequence selected from any one of SEQ ID NOs: 843-850.

11. The antibody construct according to claim 1, comprising the amino acid sequence of any one of SEQ ID NOs: 856 to 871.

12. The antibody construct according to claim 1, wherein the binding of the first binding domain to human FLT3 is reduced by FLT3-ligand by ≦25%, preferably ≦20%, more preferably ≦15%, further preferably ≦10%, even more preferably ≦8%, more preferably ≦6% and most preferably ≦2%.

13. A polynucleotide encoding the antibody construct according to claim 1.

14. A vector comprising the polynucleotide according to claim 13.

15. A host cell transformed or transfected with the polynucleotide according to claim 13.

16. A process for producing the antibody construct according to claim 1, said process comprising culturing a host cell comprising a polynucleotide encoding a bispecific antibody construct comprising a first binding domain which binds to human and macaque FLT3 on the surface of a target cell and a second binding domain which binds to human CD3 on the surface of a T cell, wherein the first binding domain binds to an epitope of FLT3 which is comprised within the extracellular region of an FLT3 polypeptide comprising the amino acid sequence of SEQ ID NO: 801, 802, 803, or 804, under conditions allowing the expression of the antibody construct and recovering the produced antibody construct from the culture.

17. A pharmaceutical composition comprising the antibody construct according to claim 1 and a carrier, stabilizer, excipient, diluent, solubilizer, surfactant, emulsifier, preservative or adjuvant.

18. (canceled)

19. A method for treating or ameliorating a hematological cancer disease or a metastatic cancer disease, comprising the step of administering to a subject in need thereof an effective amount of the antibody construct according to claim 1.

20. The method according to claim 19, wherein the hematological cancer disease is AML or a metastatic cancer disease derived from any of the foregoing.

21. A kit comprising the antibody construct according to claim 1 and a recipient and, optionally, directions for use.
